(19) United States
(12) Patent Application Publication
(10) Pub. No.: US 2002/0102531 A1
(43) Pub. Date: Aug. 1, 2002

(54) Cancer gene determination and therapeutic screening using signature gene sets

(76) Inventor: Steve Horrigan, Potomac, MD (US)

Correspondence Address: Alan J. Grant, Esq., c/o Carella, Byrne, Bain, Gilfillan,, Cecchi, Stewart & Olstein, 6 Becker Farm Road, Roseland, NJ, 07068, US

(21) Appl. No.: 09/964,824

(22) Filed: Sep. 27, 2001

Related U.S. Application Data
(60) Provisional application No. 60/236,033, filed on Sep. 28, 2000.
(60) Provisional application No. 60/236,032, filed on Sep. 28, 2000.
(60) Provisional application No. 60/236,028, filed on Sep. 28, 2000.

(51) Int. Cl. C12Q 1/00; C12Q 1/68

(52) U.S. Cl. 435/4; 435/6

(57) ABSTRACT

Processes for assaying potential antitumor agents based on their modulation of the expression of specified genes, or sets, of suspected cancer cell genes, especially for thyroid cancer, are disclosed, along with methods for diagnosing cancerous, or potentially cancerous, conditions as a result of the expression, or patterns of expression, of such genes, or sets of genes. Also disclosed are methods for determining functionally related genes, or gene sets, as well as methods for treating cancer based on targeting expression products of such genes, or gene sets, and determining genes involved in the cancerous process.

[0001] This application claims priority of U.S. Provisional Application Nos. 60/236,033, filed Sep. 28, 2000, 60/236,032, filed Sep. 28, 2000 and 60/236,028, filed Sep. 28, 2000, the disclosures of which are hereby incorporated by reference in their entirety.

### FIELD OF THE INVENTION

[0002] The present invention relates to methods of assaying potential anti-tumor agents based on their modulation of the expression of specified sets of genes and methods for diagnosing cancerous, or potentially cancerous, conditions as a result of the patterns of expression of such genes.

### BACKGROUND OF THE INVENTION

[0003] Screening assays for novel drugs are based on the response of model cell based systems in vitro to treatment with specific compounds. Various measures of cellular response have been utilized, including the release of cytokines, alterations in cell surface markers, activation of specific enzymes, as well as alterations in ion flux and/or pH. Some such screens rely on specific genes, such as oncogenes (or gene mutations).

### BRIEF SUMMARY OF THE INVENTION

[0004] In accordance with the present invention, there are provided characteristic sets of gene sequences whose expression, or non-expression, or change in expression, either an increase or decrease thereof, are indicative of the cancerous or non-cancerous status of a given cell, especially thyroid. More particularly, such genes whose expression is changed in cancerous, as compared to non-cancerous cells, from a specific tissue (in particular, thyroid) are genes that include one of the nucleotide sequences of SEQ ID NO: 1-583, or sequences that are substantially identical to, or incorporated in, these sequences. Such a change in expression may be an increase or a decrease in expression or activity of the gene or gene sequences disclosed herein.

[0005] It is another object of the present invention to provide methods of using such characteristic, or signature, gene sets as a basis for assaying the potential ability of selected chemical agents to modulate upward or downward the expression of said characteristic, or signature, gene sets.

[0006] It is a further object of the present invention to provide methods of detecting the expression, or non-expression, or amount of expression, of said characteristic, or signature, gene sets, or portions thereof, as a means of determining the cancerous, or non-cancerous, status (or potential cancerous status) of selected cells as grown in culture or as maintained in situ.

[0007] It is a still further object of the present invention to provide methods for treating cancerous conditions utilizing selected chemical agents as determined from their ability to modulate (i.e., increase or decrease) the selected characteristic, or signature, gene sets as disclosed herein, where said genes include, or comprise, one of the sequences of SEQ ID NO: 1-583, or sequences substantially identical to said sequences, or characteristic portions of said sequences.

[0008] In one aspect, the present invention relates to a process for identifying an agent that modulates the activity of a cancer-related gene comprising:

[0009] (a) contacting a compound with a cell containing a gene corresponding to (such as a gene that encodes an RNA at least 90% identical to the RNA encoded by or complementary to) a polynucleotide having a sequence selected from the group consisting of SEQ ID NO: 1-583 and under conditions promoting the expression of said gene; and

[0010] (b) detecting a difference in expression of said gene relative to when said compound is not present thereby identifying an agent that modulates the activity of a cancer-related gene. Such a process is especially useful for agents effective against cancer of the thyroid.

[0011] The present invention also relates to a process for identifying an anti-neoplastic agent comprising contacting a cell exhibiting neoplastic activity with a compound first identified as a cancer-related gene modulator using an assay process as disclosed herein for determining gene modulating activity and detecting a decrease in said neoplastic activity after said contacting compared to when said contacting does not occur.

[0012] In a further aspect, the present invention relates to a process for identifying an anti-neoplastic or anti-tumor agent comprising administering to an animal exhibiting a cancerous condition an effective amount of an agent first identified according to a process as disclosed herein and detecting a decrease in said cancerous condition thereby identifying such an agent, said decrease including the death of the cancerous cell or cells.

[0013] The present invention also relates to a process for determining the cancerous status of a cell, comprising determining the level of expression in said cell of at least one gene that corresponds to a polynucleotide having a sequence selected from the group consisting of SEQ ID NO: 1-583 wherein an elevated expression relative to a known non-cancerous cell when the sequence is one of SEQ ID NO: 1-105 and 300-583 or a reduced expression relative to a known non-cancerous cell when the sequence is one of SEQ ID NO: 106-299 indicates a cancerous state or potentially cancerous state. Such sequence identity may include 100 percent identical as defined herein and any number of such genes may be used.

[0014] In an additional aspect, the present invention relates to a process for determining a cancer initiating or facilitating gene comprising contacting a cell expressing a test gene (i.e., a gene whose status as a cancer initiating or facilitating gene is to be determined) with an agent that decreases the expression of a gene that encodes an RNA at least 95% identical to an RNA encoded by (i.e., a gene corresponding to) a polynucleotide having a sequence selected from the group consisting of SEQ ID NO: 1-105 and 300-583 and detecting a decrease in expression of said test gene compared to when said agent is not present, thereby identifying said test gene as being a cancer initiating or facilitating gene. Such genes may, of course, be oncogenes and said decrease in expression may be due to a decrease in copy number of said gene in said cell or a cell derived from said cell, such as where copy number is reduced in the cells formed by replication of such cells.

[0015] The present invention also relates to a process for determining a cancer suppressor gene comprising contacting a cell expressing a test gene (i.e., a gene whose status as a cancer suppressor gene is to be determined) with an agent that increases the expression of a gene that corresponds to (i.e., encodes an RNA at least 95% identical to an RNA encoded by or complementary to) a polynucleotide having a sequence selected from the group consisting of SEQ ID NO: 106-299 and detecting an increase in expression of said test gene compared to when said agent is not present, thereby identifying said test gene as being a cancer suppressor gene. The sequence identity may include identical sequences, as defined herein, and such a process includes embodiments wherein the increase in expression is due to an increase in copy number of the gene in said cell or a cell derived from said cell, such as following cellular replication.

[0016] In another aspect, the present invention relates to a process for treating cancer comprising contacting a cancerous cell with an agent having activity against an expression product encoded by a gene corresponding to a polynucleotide having a nucleotide sequence selected from at least one of SEQ ID NO: 1-105 and 300-583. Such a process includes an embodiment wherein the cancerous cell is contacted in vivo. The agent may include an antibody. In a preferred embodiment, the cancer is cancer of the thyroid, especially a carcinoma, most preferably thyroid papillary carcinoma.

[0017] The present invention also relates to a method for producing a product comprising identifying an agent according to the assay processes of the invention wherein said product is the data collected with respect to said agent as a result of said process and wherein said data is sufficient to convey the chemical structure and/or properties of said agent.

[0018] The present invention further relates to a process for treating a cancerous condition in an animal afflicted therewith comprising administering to said animal a therapeutically effective amount of an agent first identified as having anti-neoplastic activity using one or more of the processes of the invention.

[0019] In a further aspect, the present invention relates to a process for protecting an animal against cancer comprising administering to an animal at risk of developing cancer a therapeutically effective amount of an agent first identified as having anti-neoplastic activity using one or more of the processes disclosed herein.

### DETAILED SUMMARY OF THE INVENTION

[0020] The present invention relates to methods of assaying for potential antitumor agents based on their modulation of the expression of specified sets of genes and methods for diagnosing cancerous, or potentially cancerous, conditions, especially of thyroid, as a result of the patterns of expression of such gene sets and for determining cancer-inducing or regulating genes, and gene sets, based on common expression or regulation of such genes, or gene sets.

[0021] In accordance with the present invention, model cellular systems using cell lines, primary cells, or tissue samples are maintained in growth medium and may be treated with compounds that may be at a single concentration or at a range of concentrations. At specific times after treatment, cellular RNAs are isolated from the treated cells, primary cells or tumors, which RNAs are indicative of expression of selected genes. The cellular RNA is then divided and subjected to analysis that detects the presence and/or quantity of specific RNA transcripts, which transcripts may then be amplified for detection purposes using standard methodologies, such as, for example, reverse transcriptase polymerase chain reaction (RT-PCR), etc. The presence or absence, or levels, of specific RNA transcripts are determined from these measurements and a metric derived for the type and degree of response of the sample to the treated compound compared to control samples.

[0022] Also in accordance with the present invention, there are disclosed herein characteristic, or signature, sets of genes and gene sequences whose expression is, or can be, as a result of the methods of the present invention, linked to, or used to characterize, the cancerous, or non-cancerous, status of the cells, or tissues, to be tested, especially tissues derived from thyroid (i.e., cancer-related genes and gene sequences). Thus, the methods of the present invention identify novel anti-neoplastic agents based on their alteration of expression of small sets of characteristic, or indicator, or signature genes in specific model systems. The methods of the invention may therefore be used with a variety of cell lines or with primary samples from tumors maintained in vitro under suitable culture conditions for varying periods of time, or in situ in suitable animal models.

[0023] More particularly, certain genes have been identified that are expressed at levels in cancer cells that are different than the expression levels in non-cancer cells. In one instance, the identified genes are expressed at higher levels in cancer cells than in normal cells. In another instance, the identified genes are expressed at lower levels in cancer cells as compared to normal cells.

[0024] In accordance with the foregoing, the present invention relates to a process for determining the cancerous status of a cell, comprising determining the level of expression in said cell of at least one gene that corresponds to (i.e., encodes an RNA at least 95% identical to the RNA encoded by or complementary to) a polynucleotide having a sequence selected from the group consisting of SEQ ID NO: 1-583 wherein an elevated expression relative to a known non-cancerous cell when the sequence is one of SEQ ID NO: 1-105 and 300-583, or a reduced expression relative to a known non-cancerous cell when the sequence is one of SEQ ID NO: 106-299, indicates a cancerous state or potentially cancerous state. Such sequence identity may include 100 percent identical as defined herein and any number of such genes may be used.

[0025] Thus, the present invention also relates to a process for identifying an anti-neoplastic agent comprising contacting a cell exhibiting neoplastic activity with a compound first identified as a cancer-related gene modulator using an assay process as disclosed herein for determining gene modulating activity and detecting a decrease in said neoplastic activity after said contacting compared to when said contacting does not occur (i.e., comparing expression when said agent is present versus when said agent is not present).

[0026] In preferred embodiments of the present invention, such cancer is thyroid cancer or a carcinoma, preferably thyroid carcinoma, most preferably thyroid papillary carcinoma.

[0027] In a further aspect, the present invention relates to a process for identifying an anti-neoplastic agent comprising administering to an animal exhibiting a cancerous condition an effective amount of an agent first identified as having such activity using a process as disclosed herein and detecting a decrease in said cancerous condition thereby identifying such an agent.

[0028] It should be kept in mind that the anti-tumor or anti-neoplastic agents identified by the processes of the invention include both novel agents whose structure and anti-tumor activity were not previously known prior to identification of their activity by the processes herein as well as non-novel agents, whose structure was known but whose therapeutic value as anti-tumor agents was not appreciated prior to identification by the assay processes of the invention.

[0029] In accordance with the foregoing, the present invention relates to a process for screening for an anti-neoplastic agent comprising the steps of:

[0030] (a) contacting a compound with a cell containing a polynucleotide comprising a nucleotide sequence selected from the group consisting of SEQ ID NO: 1-583, or a sequence at least 95% identical thereto, under conditions wherein said polynucleotide is being expressed, and

[0031] (b) determining a change in expression of at least one of said polynucleotides,

[0032] wherein a change in expression is indicative of anti-neoplastic activity.

[0033] In particular embodiments, such change in expression may be an increase or a decrease in expression or activity. Of course, decreased expression of cancer initiating or facilitating genes is highly desirable, as is an increased expression of cancer suppressor genes.

[0034] More particularly, the present invention relates to a process for screening for an anti-neoplastic agent comprising the steps of:

[0035] (a) exposing a known cancerous cell to a chemical agent to be tested for antineoplastic activity;

[0036] (b) allowing said chemical agent to modulate the activity of one or more genes present in said cell wherein said genes include or comprise one of the sequences selected from the group consisting of the sequences of SEQ ID NO: 1-583, sequences substantially identical to said sequences, or the complements of any of the foregoing;

[0037] (c) determining the expression of one or more genes of step (b);

[0038] (d) comparing the expression of said genes in the presence or absence of exposure to said chemical agent;

[0039] wherein a difference in expression is indicative of the ability of anti-neoplastic activity.

[0040] Thus, in one aspect, the present invention relates to a process for identifying an agent that modulates the activity of a cancer-related gene, especially for cancer of the thyroid, comprising:

[0041] (a) contacting a compound with a cell containing a gene that encodes an RNA at least 90 or 95% identical to the RNA encoded by (i.e., a gene that corresponds to) a polynucleotide having a sequence selected from the group consisting of SEQ ID NO: 1-583 and under conditions promoting the expression of said gene; and

[0042] (b) detecting a difference in expression of said gene relative to when said compound is not present

[0043] thereby identifying an agent that modulates the activity of a cancer-related gene.

[0044] Such sequence identity includes embodiments wherein the RNAs are at least 97 or 98% identical in sequence and include cases where the sequence is the same, thus where a gene encodes an RNA with the same nucleotide sequence as an RNA encoded by one of the sequences of SEQ ID NO: 1-583.

[0045] In one embodiment of such processes, the sequence is selected from SEQ ID NO: 1-105 and 300-583, and said difference in expression is a decrease in expression. Here, the gene used encodes an RNA like that encoded by (or at least 90% identical to) one of the sequences found to be expressed at an elevated level in cancer cells, especially thyroid cancer cells. In another such embodiment, the sequence is selected from SEQ ID NO: 106-299 and said difference in expression is an increase in expression. The latter sequences encode RNAs found to be expressed at higher levels in normal cells, such as thyroid cells, as opposed to cancer cells.

[0046] In specific embodiments of the present invention, said chemical agent to be tested modulates the expression of more than one said gene, especially where it modulates at least two said genes, more especially where at least 3, or at least 5 of said genes, or even 10 or more of said genes in said signature set, are modulated. In a preferred embodiment, this may include more than 10 (such as 20, 50 or even 100) or even all of said genes are modulated.

[0047] In one embodiment of the present invention, said gene modulation is downward modulation, so that, as a result of exposure to the chemical agent to be tested, one or more genes of the cancerous cell will be expressed at a lower level (or not expressed at all) when exposed to (i.e., contacted with) the agent as compared to the expression when not exposed to the agent (i.e., when said agent is not present).

[0048] In a preferred embodiment a selected set of said genes are expressed in the reference cell but not expressed in the cell to be tested as a result of the contacting or exposure of the test cell with the chemical agent. Thus, where said chemical agent causes the gene, or genes, of the tested cell to be expressed at a lower level than the same genes of the reference cell, this is indicative of downward modulation and indicates that the chemical agent to be tested has anti-neoplastic activity (or activity in reducing expression of such cancer-related genes).

[0049] In a separate embodiment, exposure of said cells to be tested to the chemical agent, especially one suspected of having anti-neoplastic activity, may result in upward modulation of said genes of the cell to be tested. Such upward modulation is interpreted as meaning that said genes are expressed where previously not expressed, or else are expressed in greater quantities, or at higher levels, when exposed to the agent as compared to non-exposure to the agent.

[0050] Such upward modulation may be taken as indicative of anti-neoplastic activity by the tested chemical agent(s) of the gene, or genes, so modulated, resulting in lower neoplastic activity on the part of such cells, such as where increased expression of the gene, or genes, results in decreased growth and/or increased differentiation of said cells away from the cancerous state.

[0051] The genes useful in the assay processes include, respectively, as a part thereof at least one of the sequences selected from the group consisting of the sequences of SEQ ID NO: 1-583, or sequences substantially identical thereto.

[0052] Such sequences also include sequences complementary to any of the sequences disclosed herein.

[0053] The genes identified by the present disclosure are considered “cancer-related” genes, as this term is used herein, and includes genes expressed at higher levels (due, for example, to elevated rates of expression, elevated extent of expression or increased copy number) in cancer cells relative to expression of these genes in normal (i.e., non-cancerous) cells where said cancerous state or status of test cells or tissues has been determined by methods known in the art, such as by reverse transcriptase polymerase chain reaction (RT-PCR) as described in the Example below. In specific embodiments, this relates to the genes whose sequences correspond to the sequences of SEQ ID NO: 1-105 and 300-583. Also specifically contemplated are genes whose expression is higher in normal as opposed to known cancer cells (as determined by other means, such as uncontrolled growth, change in antigenic surface proteins, genetic mutation, and the like) such that the decreased expression in cancer cells may be indicative of, or contributory to, the realization of the cancerous state. In specific embodiments thereof, this relates to the genes whose sequences correspond to the sequences of SEQ ID NO: 106-299 disclosed herein. As used herein, the term “correspond” means that the gene has the indicated nucleotide sequence or that it encodes substantially the same RNA as would be encoded by the indicated sequence, the term “substantially” meaning about at least 90% identical as defined elsewhere herein and includes splice variants thereof.

[0054] The sequences disclosed herein may be genomic in nature and thus represent the sequence of an actual gene, such as a human gene, or may be a cDNA sequence derived from a messenger RNA (mRNA) and thus represent contiguous exonic sequences derived from a corresponding genomic sequence or they may be wholly synthetic in origin for purposes of tecting. As described in the Example, the expression of these cancer-related genes is determined from the relative expression levels of the RNA complement of a cancerous cell relative to a normal (i.e., non-cancerous) cell. Because of the processing that may take place in transforming the initial RNA transcript into the final mRNA, the sequences disclosed herein may represent less than the full genomic sequence.

[0055] They may also represent sequences derived from ribosomal and transfer RNAs. Consequently, the genes present in the cell (and representing the genomic sequences) and the sequences disclosed herein, which are mostly cDNA sequences, may be identical or may be such that the cDNAs contain less than the full genomic sequence. Such genes and cDNA sequences are still considered corresponding sequences because they both encode similar RNA sequences. Thus, by way of non-limiting example only, a gene that encodes an RNA transcript, which is then processed into a shorter mRNA, is deemed to encode both such RNAs and therefore encodes an RNA complementary to (using the usual Watson-Crick complementarity rules), or that would otherwise be encoded by, a cDNA (for example, a sequence as disclosed herein). Thus, the sequences disclosed herein correspond to genes contained in the cancerous or normal cells used to determine relative levels of expression because they represent the same sequences or are complementary to RNAs encoded by these genes. Such genes also include different alleles and splice variants that may occur in the cells used in the processes of the invention.

[0056] The genes of the invention “correspond to” a polynucleotide having a sequence of SEQ ID NO: 1-583 if the gene encodes an RNA (processed or unprocessed, including naturally occurring splice variants and alleles) that is at least 90% identical, preferably at least 95% identical, most preferably at least 98% identical to, and especially identical to, an RNA that would be encoded by, or be complementary to, such as by hybridization with, a polynucleotide having the indicated sequence. In addition, genes including sequences at least 90% identical to a sequence selected from SEQ ID NO: 1-583, preferably at least about 95% identical to such a sequence, more preferably at least about 98% identical to such sequence and most preferably comprising such sequence are specifically contemplated by all of the processes of the present invention as being genes that correspond to these sequences. In addition, sequences encoding the same proteins as any of these sequences, regardless of the percent identity of such sequences, are also specifically contemplated by any of the methods of the present invention that rely on any or all of said sequences, regardless of how they are otherwise described or limited. Thus, any such sequences are available for use in carrying out any of the methods disclosed according to the invention. Such sequences also include any open reading frames, as defined herein, present within any of the sequences of SEQ ID NO: 1-583.

[0057] Further in accordance with the present invention, the term “percent identity” or “percent identical,” when referring to a sequence, means that a sequence is compared to a claimed or described sequence after alignment of the sequence to be compared (the “Compared Sequence”) with the described or claimed sequence (the “Reference Sequence”). The Percent Identity is then determined according to the following formula:

Percent Identity=100 [1−(C/R)]

[0058] wherein C is the number of differences between the Reference Sequence and the Compared Sequence over the length of alignment between the Reference Sequence and the Compared Sequence wherein (i) each base or amino acid in the Reference Sequence that does not have a corresponding aligned base or amino acid in the Compared Sequence and (ii) each gap in the Reference Sequence and (iii) each aligned base or amino acid in the Reference Sequence that is different from an aligned base or amino acid in the Compared Sequence, constitutes a difference; and R is the number of bases or amino acids in the Reference Sequence over the length of the alignment with the Compared Sequence with any gap created in the Reference Sequence also being counted as a base or amino acid.

[0059] If an alignment exists between the Compared Sequence and the Reference Sequence for which the percent identity as calculated above is about equal to or greater than a specified minimum Percent Identity then the Compared Sequence has the specified minimum percent identity to the Reference Sequence even though alignments may exist in which the hereinabove calculated Percent Identity is less than the specified Percent Identity.

[0060] As used herein, the terms “portion,” “segment,” and “fragment,” when used in relation to polypeptides, refer to a continuous sequence of nucleotide residues, sequence forms a subset of a larger sequence. Such terms include the products produced by treatment of said polynucleotides with any of the common endonucleases, or any stretch of polynucleotides that could be synthetically synthesized. These may include exonic and intronic sequences of the corresponding genes.

[0061] As used herein and except as noted otherwise, all terms are defined as given below.

[0062] In accordance with the present invention, the term “DNA segment” or “DNA sequence” refers to a DNA polymer, in the form of a separate fragment or as a component of a larger DNA construct, which has been derived from DNA isolated at least once in substantially pure form, i.e., free of contaminating endogenous materials and in a quantity or concentration enabling identification, manipulation, and recovery of the segment and its component nucleotide sequences by standard biochemical methods, for example, using a cloning vector. Such segments are provided in the form of an open reading frame uninterrupted by internal nontranslated sequences, or introns, which are typically present in eukaryotic genes. Sequences of non-translated DNA may be present downstream from the open reading frame, where the same do not interfere with manipulation or expression of the coding regions.

[0063] The term “coding region” refers to that portion of a gene which either naturally or normally codes for the expression product of that gene in its natural genomic environment, i.e., the region coding in vivo for the native expression product of the gene. The coding region can be from a normal, mutated or altered gene, or can even be from a DNA sequence, or gene, wholly synthesized in the laboratory using methods well known to those of skill in the art of DNA synthesis.

[0064] In accordance with the present invention, the term “nucleotide sequence” refers to a heteropolymer of deoxyribonucleotides. Generally, DNA segments encoding the proteins provided by this invention are assembled from cDNA fragments and short oligonucleotide linkers, or from a series of oligonucleotides, to provide a synthetic gene which is capable of being expressed in a recombinant transcriptional unit comprising regulatory elements derived from a microbial or viral operon.

[0065] The term “expression product” means that polypeptide or protein that is the natural translation product of the gene and any nucleic acid sequences coding equivalents resulting from genetic code degeneracy and thus coding for the same amino acid(s).

[0066] The term “fragment,” when referring to a coding sequence, means a portion of DNA comprising less than the complete coding region whose expression product retains essentially the same biological function or activity as the expression product of the complete coding region.

[0067] The term “primer” means a short nucleic acid sequence that is paired with one strand of DNA and provides a free 3′-OH end at which a DNA polymerase starts synthesis of a deoxyribonucleotide chain. These include PCR primers.

[0068] The term “promoter” means a region of DNA involved in binding of RNA polymerase to initiate transcription. The term “enhancer” refers to a region of DNA that, when present and active, has the effect of increasing expression of a different DNA sequence that is being expressed, thereby increasing the amount of expression product formed from said different DNA sequence.

[0069] The term “open reading frame (ORF)” means a series of triplets coding for amino acids without any termination codons and is a sequence (potentially) translatable into protein.

[0070] As used herein, reference to a DNA sequence includes both single stranded and double stranded DNA. Thus, the specific sequence, unless the context indicates otherwise, refers to the single strand DNA of such sequence, the duplex of such sequence with its complement (double stranded DNA) and the complement of such sequence.

[0071] In carrying out the assays of the invention, relative antineoplastic activity may be ascertained by the extent to which a given chemical agent modulates the expression of genes present in a cancerous cell. Thus, a first chemical agent that modulates the expression of a gene associated with the cancerous state (i.e., a gene that includes one of the sequences disclosed herein and present in cancerous cells) to a larger degree than a second chemical agent tested by the assays of the invention is thereby deemed to have higher, or more desirable, or more advantageous, anti-neoplastic activity than said second chemical agent. Alternatively, where first and second chemical agents modulate expression of more than one of said genes, but where the second modulates expression of, for example, five said genes, whereas the first modulates expression of only three of said genes, especially where the three form a subset of the five, then the second chemical agent is deemed a more potent anti-neoplastic agent than the first. Such anti-neoplastic activity, as determined using the assays of the present invention, may necessarily include combinations of the foregoing possibilities, which are in no way to be considered limiting.

[0072] In utilizing these gene sequences for the assays according to the invention, the genes whose activity is to be determined with and without the presence of the compound to be evaluated for antitumor activity may be any one, or several, or any combination of the gene sequences disclosed herein as SEQ ID NO: 1-583. However, how the gene sequences are employed in such assays depends on the pattern of gene expression disclosed for the signature sets. For example, a sequence that is expressed in cancerous cells but not in normal cells will identify a potential anticancer agent by that agent's ability to decrease expression of the sequence, or sequences, in tumor cells. Conversely, a sequence, or sequences, expressed in normal but not tumor cells will identify a potential antitumor agent by its ability to increase expression of those genes in the tumor cells. The same relationship holds true where the sequences are expressed in both cancer and normal cells but are expressed at a higher level in one than in the other, and vice versa. Based on the expression patterns disclosed for the gene sequences and signature sets disclosed herein, it should be readily apparent to those skilled in the art how to conduct assays for potential antitumor agents using the signature gene sets. The same holds true where the sequences, or signature gene sets, are utilized to determine the cancerous state of a cell or use of an agent to treat a cancerous condition.

[0073] Thus, in one aspect, the present invention relates to a process for screening for an anti-neoplastic agent comprising the steps of (a) exposing cells to a chemical agent to be tested for antineoplastic activity, and (b) determining a change in expression of at least one gene of a signature gene set, or a sequence that is at least 90%, preferably at least 95% identical thereto, wherein a change in expression is indicative of anti-neoplastic activity. Such change in expression is intended to mean a change that includes any activity of the gene, and may be an increase or decrease thereof. In addition, such change in activity may be a change in expression or other activity of at least I such gene, such as 5 or 10, or more of the genes of a signature set, even as many as half of such genes or even of all of the genes of a particular gene set.

[0074] The gene expression to be measured is commonly assayed using RNA expression as an indicator. Thus, the greater the level of RNA (such as a messenger RNA) detected the higher the level of expression of the corresponding gene. Thus, gene expression, either absolute or relative, such as where the expression of several different genes are being quantitatively evaluated and compared, for example, where chemical agents modulate the expression of more than one gene, such as a set of 3, 4, 5, or more genes, is determined by the relative expression of the RNAs encoded by such genes.

[0075] RNA may be isolated from samples in a variety of ways, including lysis and denaturation with a phenolic solution containing a chaotropic agent (e.g., triazol) followed by isopropanol precipitation, ethanol wash, and resuspension in aqueous solution; or lysis and denaturation followed by isolation on solid support, such as a Qiagen resin and reconstitution in aqueous solution; or lysis and denaturation in non-phenolic, aqueous solutions followed by enzymatic conversion of RNA to DNA template copies.

[0076] Normally, prior to applying the processes of the invention, steady state RNA expression levels for the genes, and sets of genes, disclosed herein will have been obtained. It is the steady state level of such expression that is affected by potential anti-neoplastic agents as determined herein. Such steady state levels of expression are easily determined by any methods that are sensitive, specific and accurate.

[0077] Such methods include, but are in no way limited to, real time quantitative polymerase chain reaction (PCR), for example, using a Perkin-Elmer 7700 sequence detection system with gene specific primer probe combinations as designed using any of several commercially available software packages, such as Primer Express software, solid support based hybridization array technology using appropriate internal controls for quantitation, including filter, bead, or microchip based arrays, solid support based hybridization arrays using, for example, chemiluminescent, fluorescent, or electrochemical reaction based detection systems.

[0078] In one embodiment of the present invention, a set of genes useful in evaluating, or screening, or otherwise assaying, one or more chemical agents for anti-neoplastic activity in the assays disclosed herein will have already been shown to have differences in the ratios of steady state RNA levels in cancer cells, or tissues, relative to normal, or non-tumorous cells or tissues, or will have exhibited differences in the expression ratios in tumor samples compared to normal samples between genes in a given subset of the set of genes disclosed herein, or will have gene expression that has increased from undetectable levels to detectable levels, or vice versa, as the case may be, especially where sensitive detection methods are employed, or conversely will have decreased from detectable levels to undetectable levels with such procedures, especially sensitive procedures.

[0079] The genes, and gene sequences, useful in practicing the methods of the present invention are genes that are found to be selectively expressed in, or not expressed in, cancer cells as compared to non-cancer cells, or in which expression is down-regulated or up-regulated, as the case may be, in cancerous cells as compared to non-cancerous cells. Thus, these may include genes, or sets of genes, expressed in cancer cells but absent from, or inactive in, non-cancerous cells, or may include genes, or sets of genes, expressed in non-cancerous cells, but not expressed in cancer cells. Alternatively, the genes useful in practicing the present invention may be more expressed, or less expressed, in a cancerous cell relative to a non-cancerous cell. Such genes are generally those comprising the sequences of SEQ ID NO: 1-583, with SEQ ID NO: 1-105 and 300-583 exhibiting elevated expression in cancer cells related to normal cells and vice versa for SEQ ID NO: 106-299.

[0080] In accordance with the foregoing, the present invention further relates to a process for determining the cancerous status of a test cell, comprising determining expression in said test cell of at least one gene that corresponds to, or includes, one of the nucleotide sequences selected from the sequences of SEQ ID NO: 1-583, or a nucleotide sequence that is at least 90%, preferably at least 95%, identical thereto, and then comparing said expression to expression of said at least one gene in at least one cell known to be non-cancerous whereby a difference in said expression indicates that said cell is cancerous.

[0081] In a particular embodiment, the present invention is directed to a process for determining the cancerous status of a cell to be tested, comprising determining the presence in said cell of at least one gene that includes one of the nucleotide sequences selected from the sequences of SEQ ID NO: 1-583, including sequences having substantial identity homologous to said sequences, or characteristic fragments thereof, or the complements of any of the foregoing and then comparing the pattern of said gene presence and/or absence with that found for a cell known, or believed, to be non-cancerous, or normal, at least with respect to its genetic complement.

[0082] With respect to genes that correspond to at least one of the sequences of SEQ ID NO: 1-105 and 300-583, up regulation of expression in cancer cells (as compared to non-cancer cells, which may lack said genes, or said gene expression, altogether) is indicative of a cancerous, or potentially cancerous, condition.

[0083] In specific embodiments, the present invention relates to embodiments wherein the genetic pattern is the modulation of expression of more than one gene, preferably 3, 4, or 5 genes, and even includes patterns where there is a modulation of expression of as many as 10, or more, genes. Thus, where a genetic pattern is the modulation of expression of 5 genes in a cancerous cell as compared to a non-cancerous cell from the same tissue type, such as a cancerous thyroid cell, versus a non-cancerous cell of thyroid, such a pattern indicates a likelihood that such genes (i.e., the modulation of expression of those 5 genes) is an indicator of cancerous status and thereby provides a means of diagnosing a cancerous, or potentially cancerous, status. The absence of a specific set of genes from cancerous cells where said genes are present in otherwise normal cells, especially those of a similar type, is also indicative of a correlation with the cancerous state and thus can likewise be used as a means of diagnosing the cancerous state in other cells suspected of being cancerous.

[0084] In a particular embodiment, the gene sequences as disclosed herein are indicative of the cancerous or normal state of thyroid tissues. This includes SEQ ID NO: 1-583 for thyroid, wherein SEQ ID NO: 1-105 represent genes or gene sequences expressed in thyroid papillary carcinoma that are not found in normal thyroid tissue, wherein SEQ ID NO: 106-299 represent genes or gene sequences expressed in normal thyroid cells that are not expressed in thyroid papillary carcinoma and wherein SEQ ID NO: 300-583 represent genes or gene sequences expressed at a level at least about a 5 fold higher level in thyroid papillary carcinoma relative to normal thyroid cells.

[0085] The gene patterns indicative of a cancerous state need not be characteristic of every cell found to be cancerous. Thus, the methods disclosed herein are useful for detecting the presence of a cancerous condition within a tissue where less than all cells exhibit the complete pattern. For example, a set of selected genes, comprising sequences homologous under stringent conditions (i.e., at least 95% identical) to at least one of the sequences of SEQ ID NO: 1-105 and 300-583, and wherein the signature set is comprised of genes expressed and/or up-regulated in cancer cells relative to normal cells, as disclosed above for the signature gene set (or sets) used for practicing the invention, may be found, using appropriate probes, either DNA or RNA, to be present in as little as 60% of cells derived from a sample of tumorous, or malignant, tissue while being absent from as much as 60% of cells derived from corresponding non-cancerous, or otherwise normal, tissue (and thus being present in as much as 40% of such normal tissue cells). In a preferred embodiment, such gene pattern is found to be present in at least 70% of cells drawn from a cancerous tissue and absent from at least 70% of a corresponding normal, non-cancerous, tissue sample. In an especially preferred embodiment, such gene pattern is found to be present in at least 80% of cells drawn from a cancerous tissue and absent from at least 80% of a corresponding normal, non-cancerous, tissue sample. In a most preferred embodiment, such gene pattern is found to be present in at least 90% of cells drawn from a cancerous tissue and absent from at least 90% of a corresponding normal, non-cancerous, tissue sample. In an additional embodiment, such gene pattern is found to be present in at least 100% of cells drawn from a cancerous tissue and absent from at least 100% of a corresponding normal, non-cancerous, tissue sample, although the latter embodiment may represent a rare occurrence.

[0086] Conversely, where the signature set (such as SEQ ID NO: 106-299) is expressed or up-regulated in normal cells versus cancerous cells, as disclosed herein, expression in the normal cells but not in suspected cancerous cells may confirm a cancerous state in the suspected cancerous sample. The same is true for assays disclosed herein for potential antitumor agents.

[0087] Although the presence or absence of expression of one or more selected gene sequences may be indicative of a cancerous status for a given cell, the mere presence or absence of such a gene pattern may not alone be sufficient to achieve a malignant condition and thus the level of expression of such gene pattern may also be a significant factor in determining the attainment of a cancerous state. While a pattern of gene expression may be present in both cancerous and non-cancerous cells, the relative level of expression, as determined by any of the methods disclosed herein, all of which are well known in the art, may differ between the cancerous versus the non-cancerous cells. Thus, it becomes essential to also determine the level of expression of one or more of said genes as a separate means of diagnosing the presence of a cancerous status for a given cell, groups of cells, or tissues, either in culture or in situ.

[0088] In accordance with the invention disclosed herein, a determination of an anticancer agent using the signature gene sets for thyroid described herein is based on patterns of modulation of such genes so that increase or decrease in expression of a gene due to the presence of such a potential agent may or may not be meaningful. Thus, the more genes in a gene set as disclosed herein that are affected by said agent the more likely said agent is an effective therapeutic agent.

[0089] In addition, different agents may have different abilities to affect the genes of a signature gene set. For example, if a potential therapeutic agent, say, agent A, causes a gene or group of genes of a characteristic or signature gene set, or even all of the genes of said gene set, to exhibit decreased expression, such as where a lower amount of mRNA is expressed from said gene(s), or less protein is produced from said mRNA, but a second potential agent, say, agent B, while modulating the activity of the same or related genes causes said expression to be reduced to half, such as where only half as much mRNA is transcribed or only half as much protein is translated from said mRNA as for agent A, then agent B is considered to have twice as much therapeutic potential as agent A.

[0090] Such modulation or change of activity as determined using the assays disclosed herein may include either an increase or a decrease in activity of said genes or gene sequences. Thus, where a gene is expressed in cancer cells but not in normal cells, or is up-regulated in cancer cells relative to normal cells, of the same organ or tissue type, an agent that down-regulates said gene or genes, or gene sequences, or prevents their expression entirely, is considered a potential antitumor agent within the present disclosure. Conversely, where an agent causes expression of a gene or genes, or gene sequences, expressed in normal cells but not in cancer cells, or where said agent up-regulates a gene or genes, or gene sequences, that are expressed in normal cells but not in cancer cells, or are up-regulated in normal cells but not in cancer cells, of the same organ or tissue type, said agent is considered to be a potential antitumor agent within the present disclosure.

[0091] The present invention also relates to a process that comprises a method for producing a product comprising identifying an agent according to one of the disclosed processes for identifying such an agent (such as the therapeutic agents identified according to the assay procedures disclosed herein) wherein said product is the data collected with respect to said agent as a result of said identification process, or assay, and wherein said data is sufficient to convey the chemical character and/or structure and/or properties of said agent. For example, the present invention specifically contemplates a situation whereby a user of an assay of the invention may use the assay to screen for compounds having the desired enzyme modulating activity and, having identified the compound, then conveys that information (i.e., information as to structure, dosage, etc) to another user who then utilizes the information to reproduce the agent and administer it for therapeutic or research purposes according to the invention. For example, the user of the assay (user 1) may screen a number of test compounds without knowing the structure or identity of the compounds (such as where a number of code numbers are used the first user is simply given samples labeled with said code numbers) and, after performing the screening process, using one or more assay processes of the present invention, then imparts to a second user (user 2), verbally or in writing or some equivalent fashion, sufficient information to identify the compounds having a particular modulating activity (for example, the code number with the corresponding results). This transmission of information from user 1 to user 2 is specifically contemplated by the present invention.

[0092] In accordance with the foregoing, the present invention further relates to a process for determining the cancerous status of a cell to be tested, comprising determining the level of expression in said cell of at least one gene that includes one of the nucleotide sequences selected from the sequences of SEQ ID NO: 1-583, including sequences substantially identical to said sequences, or characteristic fragments thereof, or the complements of any of the foregoing and then comparing said expression to that of a cell known to be non-cancerous whereby the difference in said expression indicates that said cell to be tested is cancerous.

[0093] In specific embodiments of the present invention, said expression is determined for more than one of said genes, such as 2, 3, 4, 5, or more such genes, considered as a set, and even as many as a set of 10 such genes. A set of genes, for example, 5 such genes, may be found to be expressed at certain levels in cancer cells but are found to be expressed at lower levels (or not expressed at all) in non-cancerous, or normal, cells. Conversely, a set of, for example, 5 such genes may be found to be expressed in normal (i.e., non-cancerous) cells but expressed at lower levels (or not expressed at all) in cancer cells. Thus, by determining the set or pattern of genes expressed in cancer cells but expressed at lower levels (or not at all) in non-cancer, or vice versa, a method is achieved for diagnosing cancerous conditions wherein said genes are selected from those that include one of the sequences, or fragments of sequences, including complementary sequences, selected from SEQ ID NO: 1-583. Using the methods disclosed herein, thyroid or other cancers can be readily detected using the methods of the present invention.

[0094] In accordance with the invention, although gene expression for a gene that includes as a portion thereof one of the nucleotide sequences of SEQ ID NO: 1-583, is preferably determined by use of a probe that is a fragment of such nucleotide sequence, it is to be understood that the probe may be formed from a different portion of the gene. Thus, for each gene of the signature set of the present invention, the nucleotide sequence disclosed with respect to a specific sequence ID number may be only a portion of the nucleotide sequence that encodes expression of the gene. As a result, expression of the gene may be determined by use of a nucleotide probe that hybridizes to messenger RNA (mRNA) transcribed from a portion of the gene other than the specific nucleotide sequence disclosed with reference to a sequence ID number as recited herein.

[0095] The present invention further relates to a process for determining a cancer initiating, facilitating or suppressing gene comprising the steps of contacting a cell with a cancer modulating agent and determining a change in expression of a gene selected from the group consisting of the gene sequences of SEQ ID NO: 1-583 and thereby identifying said gene as being a cancer initiating or facilitating gene.

[0096] Thus, some or all of the genes within the signature gene sets disclosed herein as SEQ ID NO: 1-583 are found to play a direct role in the initiation or progression of cancer or even other diseases and disease processes. Because changes in expression of these genes (either up-regulation or down-regulation) are linked to the disease state (i.e. cancer), the change in expression may contribute to the initiation or progression of the disease. For example, if a gene that is up-regulated is an oncogene, or if a gene that is down-regulated is a tumor suppressor, such a gene provides for a means of screening for small molecule therapeutics beyond screens based upon expression output alone. For example, genes that display up-regulation in cancer and whose elevated expression contributes to initiation or progression of disease represent targets in screens for small molecules that inhibit or block their function. Examples include, but are not be limited to, kinase inhibition, cellular proliferation, substrate analogs that block the active site of protein targets, etc. Similarly, genes that display down-regulation in cancer and whose absence results in initiation or progression of disease are valuable therapeutics for gene therapy.

[0097] In accordance therewith, the present invention relates to a process for determining a cancer initiating or facilitating gene comprising contacting a cell expressing a test gene (one whose status as a cancer initiating or facilitating gene is to be determined) with an agent that decreases the expression of a gene corresponding to a polynucleotide having a sequence selected from the group consisting of SEQ ID NO: 1-105 and 300-583, and detecting a decrease in expression of said test gene compared to when said agent is not present, thereby identifying said test gene as being a cancer initiating or facilitating gene. Such genes may, of course, be oncogenes and said decrease in expression may be due to a decrease in copy number of said gene in said cell or a cell derived from said cell, such as where copy number is reduced following cellular replication.

[0098] The present invention also relates to a process for determining a cancer suppressor gene comprising contacting a cell expressing a test gene (one whose status as a cancer suppressor gene is to be determined) with an agent that increases the expression of a gene that encodes an RNA at least 95% identical to an RNA encoded by (i.e., corresponds to) a polynucleotide having a sequence selected from the group consisting of SEQ ID NO: 106-299 and detecting an increase in expression of said test gene compared to when said agent is not present, thereby identifying said test gene as being a cancer suppressor gene. The sequence identity may include identical sequences, as defined herein, and such a process includes embodiments wherein the increase in expression is due to an increase in copy number of the gene in said cell or a cell derived from said cell, such as by cellular replication. Such increase in expression may also include the induction of expression in a cell, especially a cancer cell, such as a thyroid cancer cell, where such expression is not detectable in the absence of the agent.

[0099] It should be noted that there are a variety of different contexts in which genes have been evaluated as being involved in the cancerous process. Thus, some genes may be oncogenes and encode proteins that are directly involved in the cancerous process and thereby promote the occurrence of cancer in an animal. In addition, other genes may serve to suppress the cancerous state in a given cell or cell type and thereby work against a cancerous condition forming in an animal. Other genes may simply be involved either directly or indirectly in the cancerous process or condition and may serve in an ancillary capacity with respect to the cancerous state. All such types of genes are deemed with those to be determined in accordance with the invention as disclosed herein. Thus, the gene determined by said process of the invention may be an oncogene, or the gene determined by said process may be a cancer facilitating gene, the latter including a gene that directly or indirectly affects the cancerous process, either in the promotion of a cancerous condition or in facilitating the progress of cancerous growth or otherwise modulating the growth of cancer cells, either in vivo or ex vivo. In addition, the gene determined by said process may be a cancer suppressor gene, which gene works either directly or indirectly to suppress the initiation or progress of a cancerous condition. Such genes may work indirectly where their expression alters the activity of some other gene or gene expression product that is itself directly involved in initiating or facilitating the progress of a cancerous condition. For example, a gene that encodes a polypeptide, either wild or mutant in type, which polypeptide acts to suppress of tumor suppressor gene, or its expression product, will thereby act indirectly to promote tumor growth.

[0100] In accordance with the foregoing, the process of the present invention includes cancer modulating agents that are themselves either polypeptides, or small chemical entities, that affect the cancerous process, including initiation, suppression or facilitation of tumor growth, either in vivo or ex vivo. Said cancer modulating agent may have the effect of increasing gene expression or said cancer modulating agent may have the effect of decreasing gene expression as such terms have been described herein.

[0101] In keeping with the present disclosure, the present invention also relates to a process for treating cancer comprising contacting a cancerous cell with an agent having activity against an expression product encoded by a gene sequence selected from the group consisting of SEQ ID NO: 1-583. More specifically, the present invention relates to a process for treating cancer comprising contacting a cancerous cell with an agent having activity against an expression product encoded by a gene sequence selected from the group consisting of SEQ ID NO: 1-105 and 300-583. Such a process includes an embodiment wherein the cancerous cell is contacted in vivo. Such treatment includes treatment of a patient, such as a human being. The agent may include an antibody that reacts with a polypeptide encoded by such a gene.

[0102] Thus, some or all of the genes within these signature gene sets represent individual targets for therapeutic intervention, based at least in part on their pattern(s) of expression. For example, genes within the signature gene sets that encode cell surface molecules and are up-regulated in cancer as compared to normal cells. The proteins encoded by such genes, due to their elevated expression in cancer cells, represent highly useful therapeutic targets for “targeted therapies” utilizing such affinity structures as, for example, antibodies coupled to some cytotoxic agent. In such methodology, it is advantageous that nothing need be known about the endogenous ligands or binding partners for such cell surface molecules. Rather, an antibody or equivalent molecule that can specifically recognize the cell surface molecule (which could include an artificial peptide, a surrogate ligand, and the like) that is coupled to some agent that can induce cell death or a block in cell cycling offers therapeutic promise against these proteins. Thus, such approaches include the use of so-called suicide “bullets” against intracellular proteins.

[0103] The process of the present invention includes embodiments of the above-recited process wherein said cancer cell is contacted in vivo as well as ex vivo, preferably wherein said agent comprises a portion, or is part of an overall molecular structure, having affinity for said expression product. In one such embodiment, said portion having affinity for said expression product is an antibody, especially where said expression product is a polypeptide or oligopeptide or comprises an oligopeptide portion, or comprises a polypeptide.

[0104] Such an agent can therefore be a single molecular structure, comprising both affinity portion and anti-cancer activity portions, wherein said portions are derived from separate molecules, or molecular structures, possessing such activity when separated and wherein such agent has been formed by combining said portions into one larger molecular structure, such as where said portions are combined into the form of an adduct. Said anti-cancer and affinity portions may be joined covalently, such as in the form of a single polypeptide, or polypeptide-like, structure or may be joined non-covalently, such as by hydrophobic or electrostatic interactions, such structures having been formed by means well known in the chemical arts. Alternatively, the anti-cancer and affinity portions may be formed from separate domains of a single molecule that exhibits, as part of the same chemical structure, more than one activity wherein one of the activities is against cancer cells, or tumor formation or growth, and the other activity is affinity for an expression product produced by expression of genes related to the cancerous process or condition.

[0105] In one embodiment of the present invention, a chemical agent, such as a protein or other polypeptide, is joined to an agent, such as an antibody, having affinity for an expression product of a cancerous cell, such as a polypeptide or protein encoded by a gene related to the cancerous process, especially a gene sequence corresponding to one selected from the group consisting of the sequences of SEQ ID NO: 1-105 and 300-583. In a specific embodiment, said expression product is a cell surface receptor, such as a protein or glycoprotein or lipoprotein, present on the surface of a cancer cell, such as where it is part of the plasma membrane of said cancer cell, and acts as a therapeutic target for the affinity portion of said anticancer agent and where, after binding of the affinity portion of such agent to the expression product, the anti-cancer portion of said agent acts against said expression product so as to neutralize its effects in initiating, facilitating or promoting tumor formation and/or growth. In a separate embodiment of the present invention, binding of the agent to said expression product may, without more, have the effect of deterring cancer promotion, facilitation or growth, especially where the presence of said expression product is related, either intimately or only in an ancillary manner, to the development and growth of a tumor. Thus, where the presence of said expression product is essential to tumor initiation and/or growth, binding of said agent to said expression product will have the effect of negating said tumor promoting activity. In one such embodiment, said agent is an apoptosis-inducing agent that induces cell suicide, thereby killing the cancer cell and halting tumor growth.

[0106] In alternative embodiments of the foregoing, the present invention relates to a process for treating a cancerous condition in an animal afflicted therewith comprising administering to said animal a therapeutically effective amount of an agent first identified as having anti-neoplastic activity using an assay process as disclosed herein according to the present invention, such as a cancer-related gene modulator as identified according to the processes of the invention. Such processes also include the ability to protect against development of a cancerous state by using agents identified by the assay processes of the invention. Thus, the present invention specifically contemplates a process for protecting an animal against cancer comprising administering to an animal at risk of developing cancer a therapeutically effective amount of an agent first identified as having anti-neoplastic activity using one or more of the assay processes disclosed herein for identifying such agents.

[0107] The processes of the present invention take advantage of the correlation of changes in mRNA expression profiles of these signature gene sets with potential (depending on the form of cancer) changes in DNA copy number of the chromosomal regions wherein these genes are located. Of course, the precise nature of the change in mRNA expression (e.g. a signature set of genes that are up-regulated at the transcriptional level) may also indicate a change in the DNA copy number for the genomic regions in which these genes are located (e.g. an amplification of the genomic DNA region that contains the involved gene or genes).

[0108] Many cancers contain chromosomal rearrangements, which typically represent translocations, amplifications, or deletions of specific regions of genomic DNA. A recurrent chromosomal rearrangement that is associated with a specific stage and type of cancer always affects a gene (or possibly genes) that play a direct and critical role in the initiation or progression of the disease. Many of the known oncogenes or tumor suppressor genes that play direct roles in cancer have either been initially identified based upon their positional cloning from a recurrent chromosomal rearrangement or have been demonstrated to fall within a rearrangement subsequent to their cloning by other methods. In all cases, such genes display amplification at both the level of DNA copy number and at the level of transcriptional expression at the mRNA level.

[0109] At least some of the genes that are contained within signature gene sets disclosed herein (SEQ ID NO: 1-105 and 300-583) display changes in their mRNA expression profiles (depending on the precise reading frame involved) within cancer samples due, in part, to changes in their DNA copy number as a result of specific chromosomal rearrangements in those cancer cells. The utilities that follow from this are (i) that the genes contained within these signature gene sets offer a time saving shortcut to the identification of novel chromosomal rearrangements, amplifications, or deletions that are associated with cancer, and/or (ii) represent key genes affected by such chromosomal rearrangements, amplifications, or deletions and, therefore, play a key role in the initiation or progression of the disease. Genes within the signature sets that identify changes in the DNA copy number (based upon their changes in expression at the mRNA level) afford an entry point into other forms of diagnostic assay for the initiation, staging, or progression of cancer to be conducted in tissue samples at the DNA level (e.g. if gene X identifies a novel chromosomal amplification associated with cancer, then that specific chromosomal region defined by gene X would serve as the basis for a diagnostic assay for cancer, where genomic DNA is extracted from tissue samples and evaluated for the presence of the specific amplification), and also the rapid positional cloning of genes that play vital and direct roles in the initiation or progression of cancer.

[0110] In one embodiment of the present invention, said change in expression may be determined by determining a change in gene copy number, wherein said change in copy number is an increase in copy number or wherein said change in copy number is a decrease in copy number. For example, copy number of a sequence expressed, or over-expressed, in a cancerous cell may be decreased due to the presence of an anti-neoplastic agent as identified according to the assays procedures of the present invention.

[0111] A change in gene copy number may be determined by determining a change in expression of messenger RNA encoded by a particular gene sequence, especially where said sequence is one selected from the group consisting of the sequences of SEQ ID NO: 1-583, especially SEQ ID NO: 1-105 (the latter being expressed in cancer cells but not expressed at detectable levels in normal cells) and 300-583 (the latter being expressed at a higher level in cancer cells versus normal cells). Also in accordance with the present invention, said gene may be a cancer initiating gene, a cancer facilitating gene, or a cancer suppressing gene. In carrying out the methods of the present invention, a cancer facilitating gene is a gene that, while not directly initiating or suppressing tumor formation or growth, said gene acts, such as through the actions of its expression product, to direct, enhance, or otherwise facilitate the progress of the cancerous condition, including where such gene acts against genes, or gene expression products, that would otherwise have the effect of decreasing tumor formation and/or growth.

[0112] The present invention also relates to a process for treating cancer comprising inserting into a cancerous cell a gene construct comprising an anti-cancer gene operably linked to a promoter or enhancer element such that expression of said anti-cancer gene causes suppression of said cancer and wherein said promoter or enhancer element is a promoter or enhancer element modulating a gene sequence selected from the group consisting of the sequences of SEQ ID NO: 106-299.

[0113] The signature sets or signature gene sets disclosed herein are useful in identifying genetic regulatory elements within the promoters of the genes contained within the signature sets that are specific to normal tissue and/or the corresponding cancer. Each signature set is a collection of genes that share a gross common pattern of transcriptional regulation in cancer vs. normal (e.g. a signature set of genes that are transcriptionally up-regulated in cancer).

[0114] In one such embodiment, analyzing and comparing the DNA sequences of the promoter regions of all the genes contained within the signature set serves to identify conserved stretches or motifs of sequences within subsets of genes that represent cis-acting elements that specifically drive a form of gene expression (e.g. increased transcriptional expression in cancer). The identification of such cis-acting regulatory elements is then available for use in driving the cancer-specific expression of suicide genes or toxins via genetic therapy using technology already well known in the art.

[0115] In separate embodiments, said anti-cancer gene is a cancer suppressor gene or encodes a polypeptide having anticancer activity, especially where said polypeptide has apoptotic activity.

[0116] In additional embodiments, such insertion of the gene construct into a cancerous cell is accomplished in vivo, for example using a viral or plasmid vector. Such methods can also be applied to in vitro uses. The methods of the present invention are readily applicable to different forms of gene therapy, either where cells are genetically modified ex vivo and then administered to a host or where the gene modification is conducted in vivo using any of a number of suitable methods involving vectors especially suitable to such therapies, such as the use of special viral vectors, including adeno-associated viruses and adenoviruses, as well as retroviruses and specially constructed plasmids to accomplish such therapies. The use of these and other vectors is well known to those skilled in the art and need not be described further.

[0117] The present method also relates to a process for determining functionally related genes comprising contacting one or more gene sequences selected from the group consisting of the sequences of SEQ ID NO: 1-583 with an agent that modulates expression of more than one gene in such group and thereby determining a subset of genes of said group.

[0118] In accordance with the present invention, said functionally related genes are genes modulating the same metabolic pathway or said genes are genes encoding functionally related polypeptides. In one such embodiment, said genes are genes whose expression is modulated by the same transcriptional activator or enhancer sequence, especially where said transcriptional activator or enhancer increases, or otherwise modulates, the activity of a gene sequence selected from the group consisting of SEQ ID NO: 1-583. In specific embodiments, the sequences may be SEQ ID NO: 1-105 and 300-583 or may be SEQ ID NO: 106-299, or subsets thereof.

[0119] In one such embodiment, small molecule screens serve to identify changes in expression of genes within a signature set and thereby provide a tool for the identification of specific functional pathways and a means of assigning defined functions to novel genes.

[0120] In situations where a signature set of genes that are transcriptionally up-regulated in cancer cells compared to normal cells, such screens facilitate the identification of small molecules that down-regulate the expression of the genes of the signature set within cancer cells. While such therapeutics make a cancer cell “look” more normal, based upon the expression of the genes within the signature set, what actually happens when such screens are put into practice is that all genes within the signature sets do not respond identically to each small molecule within a chemical compound library. If an average signature set contains 200 different genes, for example, and the expression of all 200 genes is monitored in response to a library of some 50,000 chemical compounds, and subsets of genes within the signature set consistently change their patterns of expression in response to particular chemicals (e.g., 10 of the genes always change expression in a coordinated way, such as down-regulation of one gene within the group of 10) then it always causes the down-regulation of the other 9 specific genes as well.

[0121] Such subsets or subgroups of genes within each signature set that change their expression in a coordinated way in response to chemical compounds represent genes that are located within a common metabolic, signaling, physiological, or functional pathway so that by analyzing and identifying such subsets one can (a) assign known genes and novel genes to specific pathways and (b) identify specific functions and functional roles for novel genes that are grouped into pathways with genes for which their functions are already characterized or described. For example, one might identify a subgroup of 10 genes within a signature set (5 known genes and 5 novel genes) that change expression in a coordinated fashion and for which the 5 known genes are involved in apoptosis thereby implicating the other 5 novel genes as playing a role in apoptotic cellular processes. Therefore, the processes disclosed according to the present invention at once provide a novel means of assigning function to genes, i.e. a novel method of functional genomics, and a means for identifying chemical compounds that have potential therapeutic effects on specific cellular pathways. Such chemical compounds may have therapeutic relevance to a variety of diseases outside of cancer as well, in cases where such diseases are known or are demonstrated to involve the specific cellular pathway that is affected.

[0122] It should be cautioned that, in carrying out the procedures of the present invention as disclosed herein, any reference to particular buffers, media, reagents, cells, culture conditions and the like are not intended to be limiting, but are to be read so as to include all related materials that one of ordinary skill in the art would recognize as being of interest or value in the particular context in which that discussion is presented. For example, it is often possible to substitute one buffer system or culture medium for another and still achieve similar, if not identical, results. Those of skill in the art will have sufficient knowledge of such systems and methodologies so as to be able, without undue experimentation, to make substitutions that will optimally serve their purposes in using the methods and procedures disclosed herein.

[0123] The present invention will now be further described by way of the following non-limiting example but it should be kept clearly in mind that other and different embodiments of the methods disclosed according to the present invention will no doubt suggest themselves to those of skill in the relevant art.

### EXAMPLE

[0124] SW480 cells (or other sells of choice, cancerous or normal, such as thyroid cancer cells or cell lines) are grown to a density of 10⁵ cells/cm² in Leibovitz's L-15 medium supplemented with 2 mM L-glutamine (90%) and 10% fetal bovine serum. The cells are collected after treatment with 0.25% trypsin, 0.02% EDTA at 37° C. for 2 to 5 minutes. The trypsinized cells are then diluted with 30 ml growth medium and plated at a density of 50,000 cells per well in a 96 well plate (200 μl/well). The following day, cells are treated with either compound buffer alone, or compound buffer containing a chemical agent to be tested, for 24 hours. The media is then removed, the cells lysed and the RNA recovered using the RNAeasy reagents and protocol obtained from Qiagen. RNA is quantitated and 10 ng of sample in 1 μl are added to 24 μl of Taqman reaction mix containing 1×PCR buffer, RNAsin, reverse transcriptase, nucleoside triphosphates, amplitaq gold, tween 20, glycerol, bovine serum albumin (BSA) and specific PCR primers and probes for a reference gene (18S RNA) and a test gene (Gene X). Reverse transcription is then carried out at 48° C. for 30 minutes. The sample is then applied to a Perkin Elmer 7700 sequence detector and heat denatured for 10 minutes at 95° C. Amplification is performed through 40 cycles using 15 seconds annealing at 60° C. followed by a 60 second extension at 72° C. and 30 second denaturation at 95° C. Data files are then captured and the data analyzed with the appropriate baseline windows and thresholds.

[0125] The quantitative difference between the target and reference genes is then calculated and a relative expression value determined for all of the samples used. This procedure is then repeated for each of the target genes in a given signature, or characteristic, set and the relative expression ratios for each pair of genes is determined (i.e., a ratio of expression is determined for each target gene versus each of the other genes for which expression is measured, where each gene's absolute expression is determined relative to the reference gene for each compound, or chemical agent, to be screened). The samples are then scored and ranked according to the degree of alteration of the expression profile in the treated samples relative to the control. The overall expression of the set of genes relative to the controls, as modulated by one chemical agent relative to another, is also ascertained. Chemical agents having the most effect on a given gene, or set of genes, are considered the most anti-neoplastic.

[0126] In carrying out the methods of the invention, it is to be expected that not all cells of a given sample of suspected cancerous cells will express all, or even most, of these genes but that a substantial expression thereof in a substantial number of such cells is sufficient to warrant a determination of a cancerous, or potentially cancerous, condition. The sequences disclosed herein are represented by SEQ ID NO: 1 to 583 although different genes are more or less relevant to different organs and tissues and some may be up-regulated in cancer and not normal cells while others are up-regulated in normal cells but not cancerous cells. The sequences presented herein may be genomic, synthetic or cDNA sequences and may also be represented as RNA sequences. The sequences of the sequence listing herein are mostly cDNA sequences but can be used to locate genomic sequences.

What is claimed is:

1. A process for identifying an agent that modulates the activity of a cancer-related gene comprising:
(a) contacting a compound with a cell containing a gene that corresponds to a polynucleotide having a sequence selected from the group consisting of SEQ ID NO: 1-583 and under conditions promoting the expression of said gene; and
(b) detecting a difference in expression of said gene relative to when said compound is not present
thereby identifying an agent that modulates the activity of a cancer-related gene.

2. The process of claim 1 wherein said gene has a sequence selected from the group consisting of SEQ ID NO: 1-583.

3. The process of claim 1 wherein the cell is a cancer cell, the sequence is selected from SEQ ID NO: 1-105 and the difference in expression is a decrease in expression.

4. The process of claim 1 wherein the cell is a cancer cell, the sequence is selected from SEQ ID NO: 300-583 and the difference in expression is a decrease in expression.

5. The process of claim 2 wherein the cell is a cancer cell, the sequence is selected from SEQ ID NO: 1-105 and the difference in expression is a decrease in expression.

6. The process of claim 2 wherein the cell is a cancer cell, the sequence is selected from SEQ ID NO: 300-583 and the difference in expression is a decrease in expression.

7. The process of claim 3, 4, 5 or 6 wherein the cancer cell is a thyroid cancer cell.

8. The process of claim 3, 4, 5 or 6 wherein the cancer cell is a carcinoma cancer cell.

9. The process of claim 8 wherein the carcinoma is a thyroid carcinoma.

10. The process of claim 9 wherein said carcinoma is papillary carcinoma.

11. The process of claim 1 wherein the cell is a non-cancerous cell, the sequence is selected from SEQ ID NO: 106-299 and the difference in expression is an increase in expression.

12. The process of claim 11 wherein the cell is a cell from thyroid.

13. The process of claim 2 wherein the cell is a non-cancerous cell, the sequence is selected from SEQ ID NO: 106-299 and the difference in expression is a decrease in expression.

14. The process of claim 13 wherein the cell is a cell from thyroid.

15. The process of claim 1-14 wherein expression is determined for more than one said gene.

16. The process of claim 1-14 wherein expression is determined for at least 5 said genes.

17. The process of claim 1-14 wherein expression is determined for at least 10 said genes.

18. The process of claim 1-14 wherein expression is determined for all said genes of step (a).

19. A process for identifying an anti-neoplastic agent comprising contacting a cell exhibiting neoplastic activity with a compound first identified as a cancer related gene modulator using a process of one of claims 1-18 and detecting a decrease in said neoplastic activity after said contacting compared to when said contacting does not occur.

20. The process of claim 19 wherein said neoplastic activity is accelerated replication.

21. The process of claim 19 wherein said decrease in neoplastic activity results from the death of the cell.

22. A process for identifying an anti-neoplastic agent comprising administering to an animal exhibiting a cancer condition an effective amount of an agent first identified according to a process of one of claims 1-21 and detecting a decrease in said cancerous condition.

23. A process for determining the cancerous status of a cell, comprising determining the level of expression in said cell of at least one gene that corresponds to a polynucleotide having a sequence selected from the group consisting of SEQ ID NO: 1-583 wherein an elevated expression relative to a known non-cancerous cell when the sequence is one of SEQ ID NO: 1-105 and 300-583 or a reduced expression relative to a known non-cancerous cell when the sequence is one of SEQ ID NO: 106-299 indicates a cancerous state or potentially cancerous state.

24. The process of claim 23 wherein cDNA of the gene has the sequence of SEQ ID NO: 1-583.

25. The process of claim 23 or 24 wherein said expression is the expression of more than one said gene.

26. The process of claim 23 or 24 wherein said expression is the expression of at least 5 said genes.

27. The process of claim 23 or 24 wherein said expression is the expression of at least 10 said genes.

28. The process of claim 23 or 24 wherein said expression is the expression of all said genes.

29. A process for determining if a test gene is a cancer initiating or facilitating gene comprising contacting a cell expressing said test gene with an agent that decreases the expression of a gene that corresponds to a polynucleotide having a sequence selected from the group consisting of SEQ ID NO: 1-105 and 300-583, and detecting a decrease in expression of the test gene compared to when said agent is not present, thereby identifying said test gene as being a cancer initiating or facilitating gene.

30. The process of claim 29 wherein the gene determined by said process is an oncogene.

31. The process of claim 29 wherein the gene determined by said process is a cancer facilitating gene.

32. The process of claim 29 wherein said decrease in expression is due to a decrease in copy number of said gene in said cell or a cell derived from said cell.

33. A process for determining if a test gene is a cancer suppressor gene comprising contacting a cell expressing said test gene with an agent that increases the expression of a gene that corresponds to a polynucleotide having a sequence selected from the group consisting of SEQ ID NO: 106-299 and detecting an increase in expression of said test gene compared to when said agent is not present, thereby identifying said test gene as being a cancer suppressor gene.

34. The process of claim 33 wherein said increase in expression is due to an increase in copy number of said gene in said cell or a cell derived from said cell.

35. A process for treating cancer comprising contacting a cancerous cell with an agent having activity against an expression product encoded by a gene sequence selected from the group consisting of SEQ ID NO: 1-105 and 300-583.

36. The process of claim 35 wherein said cancerous cell is contacted in vivo.

37. The process of claim 35 wherein said agent has affinity for said expression product.

38. The process of claim 37 wherein said agent is an antibody.

39. The process of claim 35 wherein said agent is an apoptosis-inducing agent.

40. A method for producing a product comprising identifying an agent according to the process of claim 1-22 wherein said product is the data collected with respect to said agent as a result of said process and wherein said data is sufficient to convey the chemical structure and/or properties of said agent.

41. A process for treating a cancerous condition in an animal afflicted therewith comprising administering to said animal a therapeutically effective amount of an agent first identified as having anti-neoplastic activity using the process of claim 22.

42. A process for protecting an animal against cancer comprising administering to an animal at risk of developing cancer a therapeutically effective amount of an agent first identified as having anti-neoplastic activity using the process of claim 22.

43. The process of claim 41 or 42 wherein said cancer is thyroid cancer.

44. The process of claim 41 or 42 wherein said cancer is a carcinoma.

45. The process of claim 41 or 42 wherein said cancer is thyroid papillary carcinoma.

46. A process for determining functionally related genes comprising contacting one or more gene sequences selected from the group consisting of the sequences of SEQ ID NO: 1-583 with an agent that modulates expression of more than one gene in such group and thereby determining a subset of genes of said group.

47. The process of claim 46 wherein said functionally related genes are genes modulating the same metabolic pathway.

48. The process of claim 46 wherein said genes are genes encoding functionally related polypeptides.

49. The process of claim 46 wherein said all of genes are genes whose expression is modulated by the same transcription activator or enhancer sequence.

50. The process of claim 46 wherein said sequences are selected from SEQ ID NO: 1-105.

51. The process of claim 46 wherein said sequences are selected from SEQ ID NO: 106-299.

52. The process of claim 46 wherein said sequences are selected from SEQ ID NO: 300-583.

The application's sequence listing, which the Patent Office published only in electronic form, follows.

SEQUENCE LISTING (583 sequences)

SEQ ID NO: 1 - DNA, 521 bp, Homo sapiens
  misc_feature (1)...(521): n=a,t,g or c
gtaatatggaattagaaacaatttggctttttagagctgaaactagaaacaacacatccaggaacagtagacttctattgtcttcaatccctaatgtcctagtgagtatgtaccctatggagaaggcagaaatgacgtggaccaggactccttacatggagagtgttttaaaggcagtttttaaaaagcccattttgtgaaagaaaccagaaggctcgtaattgctgtctgcactgtggtttctcctgggggttggggaggggagtggattaaataaaaagtttagaaggccatagnataaatatcgaaatagtatgaattttaatatatacttttaaaggggttaggcaatgatgaaaagatatgactgctttcctttcatttctcattaaattaaaattcccacaaaagtgcatggcatctttttgaaacactgctaattttaaagtttgggaaggtttatcttcatagccacaatctttgcnaaagccttggtaccggnaacaaggctccagtctgcc

SEQ ID NO: 2 - DNA, 481 bp, Homo sapiens
ataaatggtttatttttaacataagtaaatttacaaatcaaatgaaaaatgaaaaatacaaaagttcatgaatgaaataaaaaagacactctcaaaatattaaaacctatggaaagaaaataagtaattaatgaatgatgtttttgtttccaaatacaatgaagtgattttttattagagtccttgggaatcatctaagttacaatacagaagagaattaaataaatcgtatatgattttgtaattagacactctatatatcacagttctttgttaacctgggcatggaacgtccctatagcatatatttaaaaccattaattttttttaaaaaaatttgagacatggtttgttcttgttctctaaattatgtttccccatttcccttgaatgttctctattggccatcttctggaacattaaaaaaaaatcttgaaacaaattctcttgcaatgatacgtatcacataaacttgatatgc

SEQ ID NO: 3 - DNA, 357 bp, Homo sapiens
gagcggtggagggcgtcactgggtttcggcgtctggcaagcgattcagctgtctgctccctagcagccggccttcgggtcgggcgtcttccccggctactgccgcttcagttcttccggtgtggccacgagtcgggttgcacttctgtgatccatcctcatcttctaaagatgcatcctgacttatctccacacttgcacactgaagaatgcaacgtcttgattaacttgcttaaggaatgtcacaaaaatcacaacattctgaaattttttgggtattgtaatgatgttgatcgggggtggagagaatgcctctagagtgatgtacatagagaacaggagcccgagcagggggcat

SEQ ID NO: 4 - DNA, 1086 bp, Homo sapiens
cgcagccgcccgcccgcccgctcagcgcccggccccgggatgacggcggcccaggccgcgggtgaggaggcgccaccaggcgtgcggtccgtcaaggtggtcctggtgggcgacggcggctgcgggaagacgtcgctgctgatggtcttcgccgatggggccttccccgagagctacacccccacggtgtttgagcggtacatggtcaacctgcaagtgaaaggcaaacctgtgcacctccacatctgggacacagcagggcaagatgactatgaccgcctgcggcccctgttctaccctgacgccagcgtcctgctgctttgcttcgatgtcaccagcccgaacagctttgacaacatctttaaccggtggtacccagaagtgaatcatttctgcaagaaggtacccatcatcgtcgtgggctgcaagactgacctgcgcaaggacaaatcactggtgaacaagctccgaagaaacggattggagcctgtgacctaccacaggggccaggagatggcgaggtccgtgggcgcggtggcctacctcgagtgctcggctcggctccatgacaacgtccacgccgtcttccaggaggccgccgaggtggccctcagcagccgcggtcgcaacttctggcggcggattacccagggcttttgcgtggtgacctgagcggctcggggcgtcccagcgacgcgggaaggggcagggcgctgacctgctgctgagctggctgggctggacccggtccctaggctgtgaccgccgaactccactgcaacagacgggcgccaccaaagccaggccctgaggcctgggagtcctggactgagaaagggggttcctgggcccacctgctctgtgtagggctcgtcctgcggtgcccgagaatcactcgctaacccctatgcccggtcccggaccgacatcctggagccgcctgtgcagcctgatgccccctcgtggctgctcccagggctgcacctgccaggacctaatgttcttaggtccctctggccagaacccacacccggccccttcccacctgtcatactggtaactgtaacaagaaaaacgacatcactt

SEQ ID NO: 5 - DNA, 486 bp, Homo sapiens
  misc_feature (1)...(486): n=a,t,g or c
tagcaccatgatcctcgcgctggagctgtgtgaggagatcgtggtctatgggatggtcagcgacantanctgcagggagaagagccacccctcagtgccttaccactactttgagaagggccggctagatgagtgtcagatgtacctggcacacgagcaggcgccccgaagcgccaccgcttcatcactgagaaggcggtcttctcccgctgggccaagaagaggcccatcgtgttcgcccatccgtcctggaggactgagtagcttccgtcgtcctgccagccgccatgccgttgcgaggcctccgggatgtcccatcccaagccatcacactccacaaaaacatttaatttatgggatcctgcctcctgccacgtgctgggtgggancttaaggttccttcccaccccattgtgggcgacatttggagccattttcaggcttccattccctgagtaattcatgggcattttgggggttcancca

SEQ ID NO: 6 - DNA, 1515 bp, Homo sapiens
ttttttttttttttcatcaggtcagagccaaaggaaagcttgaaaaatgaagacattagcaggacttgttctgggacttgtcatcttggatgctgctgtgactgccccaactctagagtccatcaactatgactcagaaacctatgatgccaccttagaagacctggataatttgtacaactatgaaaacatacctgttgataaagttgagattgaaatagccacagtaatgccttcagggaacagagagctcctcactccacccccacagcctgagaaggcccaggaagaggaagaggaggaggaatctactcccaggctgattgatggctcttctccccaggagcctgaattcacaggggttctggggccacacacaaatgaagactttccaacctgtctttggtgtacttgtataagtaccaccgtgtactgtgatgaccatgaacttgatgctattcctccgctgccaaagaacaccgcttatttctattcccgctttaacagaattaaaaagatcaacaaaaatgactttgcaagcctaagtgatttaaaaaggattgatctgacatcaaatttaatatctgagattgatgaagatgcattccgaaaactgcctcaacttcgagagcttgtcctgcgtgacaacaaaataaggcagctcccagaattgccaaccacttcgacatttattgatattagcaacaatagacttggaaggaaagggataaagcaagaagcatttaaagacatgtatgatctccatcatctgtacctcactgataacaacttggaccacatccctctgccactcccagaaaatctacgagcccttcacctccagaataacaacattctggaaatgcacgaagatacgttctgcaatggtaaaaatttgacttatattcgtaaggcactagaggacattcgattggatggaaaccctattaatctcagcaaaactccacaagcatacatgtgtctacctcgtctgcctgttgggagccttgtctaatttcagataatggttagcattacgatggctactataaataaaccattcttactgctctcttccaaaacaaaactcagcatgatactttgagattgtgttctgagagatgatatgactacataaaatacaattaaaaatgttataatataatgaaaatgtagtaatttaagaaaacaccagatgagttaggaataaacctataacatttacaaaaagagcaaaactaagtgatagaaaatatttcacacatgttcttatagatcatgtatcacttgcaagttttaggagttcatatcctatatcatttcaaattaagtacataataaagtaaaattttgaaatgaacactttaggtatttttgccaagatttagatgtttttaattaaacttttctcttcctttttttttcactaaggcatgtttattcccctaatccattaaagagcatgaaaaaaagaataaatgtatttgaaaaaaaaaaaaaaaaaaaaaaaaaaaa

SEQ ID NO: 7 - DNA, 480 bp, Homo sapiens
  misc_feature (1)...(480): n=a,t,g or c
gggaagtttactgggccatcacagacttttgttctagtgattgtatgtattaggagtcatagcatgccctacggagatctggattcttatacactaagatgtgtcttaagaatcacagtgcgtgcttcatccctttattgaagaacagaaaattatgactactctacaaggtggataatattttggtacctgtggctggccacagccctgttcctcaaagctgaattgatagatttctctttgacttccaagacctagcagttataaggcaccttgaaataaattgtttgtgcctggaaatgcagggagggcaatagctttgtaaattggnttacatttttctccttgaatttttctagggtcctagtgcttccgaatcatttaatggcattgtcggatatccttttacatttcaattgcaatccatgaaattacatttagaagattcttagtacttaacggtagtcttcccatgaattt

SEQ ID NO: 8 - DNA, 416 bp, Homo sapiens
  misc_feature (1)...(416): n=a,t,g or c
atttcagangaagtttattaagaggttttaggctttaagcatatgtgaaaagcaaaaattacattttaaagtatataatttgcattttccaccttctcaatgccaatgaaatattctaggagactctataagataaccaattgattttctactactcccaaattttaactttgtaatttaaagaggaataggcaaatagagctgctgtggttctggttctccctgcaggatgaagggggcctgcaaaatgtctcctacttccattctaggtcattcagcaaggtgccttcctctggatgcactgtctgtatacttttgccatgttgcatcacataatggattctggcccaccttacaccattttgactgtcagtaaaagaatggtatggtggcccatttcttcntttattaatagc

SEQ ID NO: 9 - DNA, 371 bp, Homo sapiens
tttgacacgtgaagggttatttatggttatgatgaccctgtcctgcaacgagggactggcagccactactgaggaggagggtcccatctctctcctgtcggctttcaccgaggtcacagccagacgtggggcaaaggtgttccctgtcctacccagccattcctgggcctgccgcctaggggctcacagggcccaggagtccccagctcacaggccagggcatcaggccaggcgcgctcggtgcacaccgcacctgtggaggacctgggtacactcaggagaccaagagcactggcgggtcaggatggttggcgttcagctcctacggggtggggagaagtctgtagccgagagcccagccccctcctgcc

SEQ ID NO: 10 - DNA, 419 bp, Homo sapiens
aagtattctgtccctttaatagctttgttttaggggtaactcccctcgccttgtggggaggcttaggacgggcgggtgcaatcctcgaaggggagtctcagcgaccatgggggacaccatccacatgcaggcggtagttggggcctcggcagcgcctctctggggtgccgggggtccctgttgcccctcagtgccctgtggcgcaagggctgcaggggccggctgttaccgctgaggctctggaagatctgagatggaggattctggctcaggagtctcagggagtgcatctgaagggaggtgatattgagggcccggtcaatgaggatccaggtgacagtctcggagcagggcggggtgctgagagagccctgataggtgatgaaaccgaagattcagggaacaggagctccaggctc

SEQ ID NO: 11 - DNA, 270 bp, Homo sapiens
tacagggcaacccacccctaggcaaagcctcggcctctcccacctcccccacgtcatcactgagctgcggcacgcagaggtgccagccaattccgaggagaattgggtccaatagaaatatttacaaataaccagggggcaggtgtgccgtgatcgggaatcgtgagggaactgagtaccagggggcccttggctcccaacagccccaggccctggggcggacttggcacaggacccaagagggaactggggcattggggggccggcaga

SEQ ID NO: 12 - DNA, 255 bp, Homo sapiens
tttagtttagcaccatttattaagtgatctcagctgttgttgtagctgctgcgtgtcaccgtgttcttaaaacataaaatgctcttccgattcctcttgtccaggacagaaggatcttccaggtagcacgccaacagaacaagagactccgatgacgccagcttcaatgatggtgccatccagagagggagagggtcatggcacattcaaccgcggcttccagaggttttgaaaaaggagcctttgggggcccag

SEQ ID NO: 13 - DNA, 358 bp, Homo sapiens
caggttgaataaaatttaattgataatgctttatattaatattctcttttgcatttaaatattatatgaatactacaagcatccaacaagaaataaccttcataaattagcataatttatagcaggaaacccaaataaactaaacttggctgcctaaaataatttgtctaaagggggatatgctctttgtaagtatcatgctgataaaaccataaaaattcttttagaggaatgaggattaaaatgaaatttctttatgacacggaaaaaaataataatttgtctaaaagtgtaaaattttaaaagcaaacattatacacataaccagcacaattatttccatcttaaaacattggtt

SEQ ID NO: 14 - DNA, 266 bp, Homo sapiens
atggctaatggtgacacactttattaatttaaaaacacgcccttcccacatagtgcgtgaggcatgtgcacattttcctagaaggacatgaatagtgatgtggaggtacggtggaggtcaggcatctacagggtcattcgaggaggaacagattcaagctttcggacgatcagtgttttgtaaatagcagcatcatcagatctaagacaacattggacctggcagggccttttctttgggtggcattaattactccagattcagac

SEQ ID NO: 15 - DNA, 287 bp, Homo sapiens
aacgtaaacacaaagtctcatttatttttgtctgaagcacacaggagctcactcagcacaataacagtaagcgaatcatacaaatattgagaaaaaatgttcctatgaatacatacatgtatattcttaagagtagcgatcaggagtttaacaacaaatgtaaagtggttttctctaaagaatgctttctgacaggcttttgggttggaaatggacaggtaaatcactgtcacataacaggtaagctaagaataacttctgttacccaagtcatttgaaccctgtgg

SEQ ID NO: 16 - DNA, 291 bp, Homo sapiens
  misc_feature (1)...(291): n=a,t,g or c
ttttttttttttcttgtggccattcccaggtttaattacaaaccgatccgaacatcccatctgggtcgacagctgggagggcaggattggggggaagctgctgggcgcacggncnaggcaaccacgtccttcccctgctcccaggtggagtaggggcctcacgactgcctcgatatccactgtcttggagcagcctggctaccccgagatcccaggtgacctcaaggctgcctgcacttcagcgccanatgntatcctggcctgagaaccccaaagcaccttaagcgtccc

SEQ ID NO: 17 - DNA, 413 bp, Homo sapiens
  misc_feature (1)...(413): n=a,t,g or c
aaaaatctatcaccnaagaatattgaaagaaattcagtaaaacaagatgtgtctcatagttaaggagagacataaaaataaaaatgtcatttaacagtttgaatttaggatttactgttaatcagaaacaccgaggaggcttaactcaccttttaattgagaatgtgggaaggaaagagagtaaacacattaactttagtagcagaagtgctgctaaaagaaatacgtgaaaggaaatgtaacagacaaattggcttttatcccttttgataccaatatatgtgtatacaagtcataacactggtaagtagtgtcttaagggccaaaaatggtagcttcttggtttataaaacctaatggagccacttggaaaaaatttacactcnggaaattaaataaggaccctaataatg

SEQ ID NO: 18 - DNA, 293 bp, Homo sapiens
ctcttctaattcattgtttttcttttaaacattgtgcacaagcttatattcacatagaaagcatatacatcttataaatcacagacttttttttaagtagtactccagtttatcagctcattttacacacatatttaggcaacagaatgtataaatctaccgcaatacagaggacacactatccagaaaagaatgaacaaagaacaggctgttgcaaaaatatttagtccctttacacatatagtcaaacttcattaatgcaaaaaatgtagtggttattaaatgtctgaaag

SEQ ID NO: 19 - DNA, 400 bp, Homo sapiens
tttttttttttttttttccagatcaggaagttttattgctgacatgcaggaagagtccccatgtagtacaaaaatatgtctttatacaaacttttttgtgactttttccgtttctttacaataggacttctctcagtcgtgtgacacccagtgagggctgacccatcctcctctcctttgcttcaccaggaatgtcatcagacacatggcttgaccttggaagggcccagtctgtctgacagggctttgcagacccggcggctattgctttgaaaaggaggagaaagaccacgcacgggcagcagctgggagggacccggtggctggctgagagggggctccgctggcgacgggccctggcaggctttcaggccctcacaggaggacagtcaagggctgg

SEQ ID NO: 20 - DNA, 149 bp, Homo sapiens
tttcacacgcacaacttgggaatttaatcttcacttttcctcccataaatatagagtgagggtgtgataccagccccagcccagtctccttggggtctgcatctctgcttcctggcagcctcttgagtcgacttggggatttgacgtca

SEQ ID NO: 21 - DNA, 266 bp, Homo sapiens
  misc_feature (1)...(266): n=a,t,g or c
ttttattatccagacacacgtatcagagcctgctaacatccagttgtgggaagagcagcaagcagtacaccaggagccacaggaagagantaaaatacatcatatccggctgctggacaagctgtgtcagggagtcactctgcgggctgtggctccccagtgacatggcttctcctgagctgttggccttcctacagaagaaacacagaggaaacgcagttaccaagcaggttcccagggaaagtggaccccacccantgctaccc

SEQ ID NO: 22 - DNA, 510 bp, Homo sapiens
  misc_feature (1)...(510): n=a,t,g or c
gtactcattaatcccctcctcaatttttaacagaattataaaagcaaagtcaaaaggtccttcaggatgactgggaggcttcctaggctaacttttgcatttgaaaatggaaaaaataaattacttgatatttgtgataagactaagatttcttaaaagtctgcacatcaatatattacctgggcttaggagggtgagggcacagtatccatctgcaccctctcctcgtattttttaaaaacaggcaaaatatgtaagaaaaggctggtgcacgttggaagacagagcgtgcctgtctatgccagtgctgctgtgccctgcagcctgggnaggatgggagtcggatgctggggcctcatgnccacttagggccaataacatactcaagactctacagccctttcaccagcaaagtatgncctgaggggaaccactgggtgttgggagttgaaggcacacaaagcaggggctaaagggcaattggggtttcacggtgcaggcgccttgagg

SEQ ID NO: 23 - DNA, 498 bp, Homo sapiens
  misc_feature (1)...(498): n=a,t,g or c
ccccgtcagtcaatcttatctggtaatgggatcattactgttatccagtgtcaatggtctcagtagtatttccattcaaaaataatttagcttttagattaaggatttctctttttgttttattaaacattgaaaggtgggactttaaaaaatggtataaatctagattttaaggattcttttcttacaaactgtctcagctttttacaagaaatgtttaaataccaaaatgctgctcagaaaatttaaagtttaattgcccgtggttattctactgtttctatcctaatgtgtgctcctctgtactgcgtgtgtaagacgctcagttcatctgaatgtttggatgggaagttttgtgttgagcctcaggnatagcactggaccagcccagggcgcttgtggcagacgggaggggngatgggagaggcagctggttttttctgaggggggtcttggccaaacgcaggcagctggccacaaatgggcttggggggtaac

SEQ ID NO: 24 - DNA, 335 bp, Homo sapiens
  misc_feature (1)...(335): n=a,t,g or c
tcttcccatgttgcccaggctggtctcaaactcctgggctcaagtgatccacctgcctcagcctcccaaagtgccgggattacaggcataagcacctgaacccggctgttattactatttttatttacaattaaggaaaccaaggatcggaaatgttttactttatttataaattgcccaacgtggagaatagcaaagccaggattcaaacctgggnagtctggctccaggntttacactccaaatcaccatcctatgctgcagtctattttattttatttttttagacagggtctcgctctgttgcccagggtngagtaccagtgatccctncc

SEQ ID NO: 25 - DNA, 381 bp, Homo sapiens
ttttttttttttttcattcaacaagtgtttattgagcatctactacatgccagacactattctagaaacctgggaaaggaggggttagggtagcttggagctgtcccagctgtagctctgtctcccagaagtgaggtctgcaggggaacagggtctgggggtcctcctgcctgggagagggaaggctgagtgtataaaaaggtggaagcctctagaaatgagaaggctgggtgtgtgggactcatgctggtgccttcccagacgaaggagagggcccagaggaggcagcttcctggagcagagacggcagcaggagcgcccgtgcccggcatcacctcctcttcagcacggatatgcaggacttcttgaggggcccgatct

SEQ ID NO: 26 - DNA, 463 bp, Homo sapiens
ttttttttttttttttttttggtggtttgaaataatctttattttgtaaacatctgtgtttaaaatagatgaaccctgctcacaattcatatatggacccgagacacagtacacgaagttcacccgtcacagggagatagtggaggctcaggagcaggtggcgtgcctggggctggatggagtctcaagacagcaggtgcagaggtggtgacgagtaaacaggccagcagaacctgcttaacagtctgggcctcaagacataccccaggccaccaaaagtttagggtgagcgtactgcaccctaaaatcccaattctccttctgctcccataccttttcccagtcatggcccttgtggatagggcctatcagtctatagaatcctgattccatgttttcccttccagaacccctagggtacagtacaaatatagtccttctttcctgaggggggctaggagag

SEQ ID NO: 27 - DNA, 454 bp, Homo sapiens
  misc_feature (1)...(454): n=a,t,g or c
caggtggaggtgagtttaatggcggnagctcacagccctttcccctggggccaactccccacaacagagcagggctgggcagcagaagacgttaaaacccaaatcccgacagaggcacagacctgcacatgcgccacacccacacacatactcaggggactgacaggacacatgggacacagacccgccctgcctgtgncagagtcctgtccaaggcaatggcgtaggctgcgctcagttcatccgagtccctccccagctcactggtccaggccaagggatgggagaggctttgagtctagaccttgtacagcgtctgcagcagactgtggcgggcgaaggagcaggattccagggcgctgttgggcttggtcacgaacgccagcagcaggggtgcaagggccttggggaaatagtcctgctgcaccatgtggttcagcgccatcagggggcc

SEQ ID NO: 28 - DNA, 329 bp, Homo sapiens
  misc_feature (1)...(329): n=a,t,g or c
tttttttgggatgcagcactttctttattgcccatccagggaacagccaagccagctccatctgcattctggctgcagcgtgtacattaggggactcaggggccacagtgtgggaccgtgcacactggcaaggcactggcggatntgggcaggccagttggacatggatagatgagaatgacaactcacagatgtcctagcttctgctggcccagctgccancactgncatcacccttttgcccagcatgtgtgcattgtcacccaaaacatcttgaaacttgccattagtgaggcattcaacaaagaagtaagctaagtgagtaggaa

SEQ ID NO: 29 - DNA, 427 bp, Homo sapiens
tttttttttttgagctggagttttgctcttgttgccaggctcctgagcagctgggactacaggcatgcaccaccatgcctggctaactttgtatttccagtagggtttctccatgttggtcaggctgatcccgaactcccgacctcaggtgatccgcctgcctcagcctctgggattataggcgtgcacttgcgcccagcctccagttttcttttctttagagcagcggttttaaatccttttggcttcaagttctctgaaaatttactatgctctccacaacaagagctcccattttccacagacacagtcaatgtcagtcagcttgtattcaggaggacagggcagagggatcccagtggcacttcccatgggaagacagaagagagtgggccccagagatggaaggaccccagtgtcatcacca

SEQ ID NO: 30 - DNA, 426 bp, Homo sapiens
tttgcatccagttgacaagacatttaaggtgtttatcaggatcatgccctggccccagcttcccaataccagctgttgaaaagattctctctcatctggagagaactggagtgcacagttcacccacgtggctccgggttattagttactgtgggctggtcttggtcagaggcatctgcagctggagtcacagctggacttgcagtggacgtggcagtgtctggggaggcctgggatggtcttggagggggatcgcttgctgagacagactggaaatactgcacagtccaggcgatcaatatggatagcagaaaggttcccagaaagtagatcagggctgagtgcaggatagcaccccagagaagccgcaagtgcaggtaaagccaggccaaggagcaggggctgaaggactcctcgttactgtga

SEQ ID NO: 31 - DNA, 456 bp, Homo sapiens
ttttgggccacactgagtgaattttaatgcaggatggaagcacacagatgggtgatcaggtctctctttactgaaacacagaacatgtgccaaggtgagtccaaggacacctctgggaacaggtgaagcccctccccacacatacactccggtggatgtgagcgagggtcctgttgccacatctggggtcaggggcttggacatgctgcccttcatgggaaccttctgggtacctctcagcacagtaacgcagctgcagtctgtcggtgggggcccaggctaggggcagcaccctcttttggcatacgggacatgcctggctgcagctgatgtccgttagcctctcctgacacgcagtaaggagacctggaagtgaggcgcgtgggcgtggagttcccggtggagcttgctgcatcagcctttcttgccactctggggtcagtgaagtctttcccg

SEQ ID NO: 32 - DNA, 386 bp, Homo sapiens
aattttaaagtgtggttttattaatgcacttcagggtaagtgccagtcttattttagcttcttctggaagaaatactaccaattataaataatcacagcaacattttcattagacaaaaactgtgtgtgtgggtgtggtaggggggtatcatttatagcatactgcaaatataaactcaattcttgagctatattaacaacactgagcaacaatatttctttctaaaattttcttttctttaaggcagatctgtttattactaacatggtgcagtgtagttttagtaaatttactattttagtttctcagtgacaataacacagatggtcagaaaacaggcaacaaaatctcttttctagttcctctacctggccaccatttaaaa

SEQ ID NO: 33 - DNA, 240 bp, Homo sapiens
agaattcgttgtgcatttatttaaaatttatttgttcatagctatacatatattatacatgtatacctgctcacagcataaagtatttcatgacatacttgtaagagtcagtgttctatgaattcactagagaagttacagcattttgattatgatacacgaaaagaaacccaagtcatttagcttaactccttaatttcataaaccagaaaactaaaatccaagatagattgggtgact

SEQ ID NO: 34 - DNA, 427 bp, Homo sapiens
ttttttttttgaacactcacttcaatttattgcatattttctaaatgcacctctctctctcttctgaaagagagaacatttcatcagaaaacgaacggggtcttttgcctatctgatggtctcacaccttcacaacagctacaaatccttggaccagccagggacagaccaactccagggttctctgacaacagaagtcctggaaaggctctgcactcaaaacaaacccctacaccaccccaagggagggggattgtttcaggttcggggagacgctaaaagaaattgaacctaaactcttcatcaggcatgtccagagtggctttggctctccatatagagcgaggcctgcagaccctttggctcttctttctggtggctccatctacaggttgcacctgggctgaataagcagcagctctgagag

SEQ ID NO: 35 - DNA, 476 bp, Homo sapiens
gttgtgtttttctcagtggatcagcttatttaattgatgactgtacagttaattcatgctcaaaaatcaaacattctaagcttctttctatgaatatcttccagaccaagattattcatctcatggttttaaaggacagaatttcctggagaatgttggtcctcttgtaggtgctactgcagcaaagttgaaacaatcatacgtcagaccaaaatacaagtcagttcttcagttttcactaattaaaattaactctgtctaaataaatcaactcttaccaccttcaggattcatatctcaagtaagagacattcttactgaccaataacacaaaatatcccaccctcagcactaggatcctcagttttgaattctttcaaccatttttgtcaaaagccttgctgtagccaggtgtggtggcacattcctgtaatctcagctactcgggaggctgaggagggcagatccattgtccc

SEQ ID NO: 36 - DNA, 428 bp, Homo sapiens
aataggttacttgcaattgttattgcaggcaacaacttgtacatgattttatttccaaatccacaaaaaacaaattttatacaaatcagcactgtaaaaatgtcaattacagccccagaggctttgctggcagaataattgtctaaattctagaatatgggaaacaggtttttttctggattcatctttttttttcatttttttttttttacaaaaaaaatttacaagtgaaatgttactacaaaactttttataaggaatttttgcaaaacatttacattttaccatcaactatttctgttttaaaatcattatgtagatttaataccctatgctgcacatcaatttatgtgggatgacaacttagtgacatgcataaaaaaacaccacaaggcattaaaatggagacttaaatacaaatattgttg

SEQ ID NO: 37 - DNA, 193 bp, Homo sapiens
tgttctacttttaaagatatttaatgatgtttttcaaatcagtacaaaaatttaaatacaaaaatgatttgctattgacaagtctcaaatctgtcatgggaactcaaacaagttaccagtctgttcaccgttcattgtattctataaaatatttgataacagtcacccactacagacattcttttcccctgtg

SEQ ID NO: 38 - DNA, 421 bp, Homo sapiens
ttattttgccagtgcagaaacgtttaatagaaataaaaaggtctgcatagagccgaggccggagccacccctctgccgcacatccagtacagagaggattctataaagttcacactttttcattaagtagtagtagaaatacggtgaggccctgagactggcctggtgagcgaggaaaggccgctggggcgttccactctgcaggccggggctgaaataacccgagttccgttctcacagaaaggtgcggctgccacctcttgacacagaggccggatgggcaggtgtcctcgatggccaggccgtatcagggtacaaccgcagcagtgcaaggggcttcctcaaggacaaatggctaaaaatgtcacggtgaaaatgtcatccccaaagagttcgttctccctagacccgtgggggcaac

SEQ ID NO: 39 - DNA, 530 bp, Homo sapiens
tttttgaggtttggttttgtttactgcgacatacacatgaaatcgagtatacagtccatgcagtagcacagccattcgagaggacatcctgatgctggctccagtgcaaaacagtcccagcaacgccgcctgcttgccatcgctgccgccgccactgacaccttcaccatggccacctagcctgacttgaagaggaggattgcaacttgacccaagtaaaaatagatgaagtgctttgtctcgtgtgtgacgtagctgccaaaatttcggcccacgatacaatgccaggtagggttatatttcttgtcaaattccttcttgatataggcagcaatgtccttctctatattgtacttctccatggcctgcgtggcgcagtcaacggcatcctgttgcatgtcctcagacatgtctgcgttcttgatcactgccttccggtcagacatggtgtgacactacagaaggagcagagaggtaaggctgacaactccttgctctgggcagtgaacattagctgctgggtgtggggt

SEQ ID NO: 40 - DNA, 418 bp, Homo sapiens
ttttcctaaaatattttttattagaaatatagctttagtaacaaataaccatttgatagttacataaacatataacagatatgctctacatgtgtaatttaagtacattaatatgagcattctttatgggtatacatcatataaaaataaatcattttcatacttttttaaatgttggcactgtaagtcacaagaatgagctactcagtcagtctccctatttcaggaagcctttgcatggaaggacagagtctctgtgaagttctctgggaagtaaaggaggcgctgatagggactgaaggctgccttagctcagaagagctcaaggcaacagggcaatttggggagagtcacaggcacaggaagggcgtagatagaagatacgtaaaatcaaatcaggaagttttgttatattgtt

SEQ ID NO: 41 - DNA, 257 bp, Homo sapiens
ttttttttttttttttttttttttttcagcaacctcggctgtatttattgatacaaggaagatcacccgagagtcagggacgtggcggcgaggggccctggaaatctccagataccaaagctggaagggcgtggagtcttctccagttctcctagtttacagatgttgtgacctaggcttacaatgggcctggggtctgaaagcgggacgtgggctgcgggggtcaaagagccggtttggtggaggtcagcgccaca

SEQ ID NO: 42 - DNA, 510 bp, Homo sapiens
tccagaaatgcttttccttttatttcagaagaaaggacataaaggcagacacttcccccgcccgctccccacccctcccagctcctgcctcacccagaactggagtgaaaggccagggccaggaccagggtcccataaagcttgcccttcccccaacccttccttccctcaaagtggcaaggttagaaaaaaattaactatgttgttcctccctggcactggataaaggccccactgcagccaaggagaaagaggggggtccaggctcccctcccaggcagagaagctgccgtggctggctagggggagggtggaggtaggttatgggacagagaggacaagaagtgccctgaacaccttttccctttaacctgacatatttatatatttacagttattagggagggaaggacatctggggtgacatcagttctgcaaaggcagggaataaaagccaaatagcacccccatctgggtcacattttcctgcctcctagcttctaaaacctt

SEQ ID NO: 43 - DNA, 392 bp, Homo sapiens
tggagcccgggaagagaagaaccaaagatgatacctggaaagcagatgacctcagaaaacatctctgggccatacagtcaggtggttccaaggaagaaagaaagcacagagagaagaagctgcgtaaggagtctgagatggaccttcctgaacataaggagccgaggtgcagggatcccgaccaggatgccaggagcagagacagggtggccgaagtccacaccgctaaggagagtcctcgtggggagagggacagagacagacagagggagaggagaagagacgcaaaagaccgggagaaagaaaagctgaaggagagacatcgagaggcagaaaagtctcacagcagaggaaaggacagggagaaagaaaaagacagaagggcccggaag

SEQ ID NO: 44 - DNA, 394 bp, Homo sapiens
ttttattttctttgttatacgtctatttattaatgaaaaagtatcaccaacatccatttaaaaataagcaaaagacattaataaacattcttccaaagaggatatacaggtggcaactagatacaagatgttcaaatgttcaataccataaaataccagaaaaatgcaataaaatcacagacagatgctattatacagctattaaaacaactaaaattaaaaagactaaccataccaagtatggcaagaatgtagagaaataagaaggttcacatactgttgatgagaatgcaaatggtacagttaggttatagtctggccttgtctttaaaagtgacgcattcacgtacactgtactactgacccaggagaaataaagcatttctgcatatta

SEQ ID NO: 45 - DNA, 340 bp, Homo sapiens
ttttgcagcttccactctttatttccaaagaatcagtgtcacacatgcagatcacaaagcgggtctccctgtgctgcttccttctgtgttttctagtctctcccccaggggctgcccagggccctcaggaactgagtgtgggcaagacactgctgggccagagggcacgacgcccacgtgggcccgtattgcccaggccatttggcagtgcagagcccccccagcctccagcaggagccccctggcatgagctctcccctcaggggtcctgagcaacgtccctgccagggctggtgggtggcagcgggggggcagacacctcgctgaggtcctgcagcag

SEQ ID NO: 46 - DNA, 418 bp, Homo sapiens
acaaagcagcaccttgttttactgagggtagaaaataggaagtccgctccctgcctcacccctcttaagcatcaaagctcagacgtcagcgggacttgaagagtctcagcctgggcagtgcagtcacaacacctgggtttccagccgccggagttccttgaccacaagatcaatgttaataattgggttaaagtacagggcccagtaaaacaaacagttgcaaacaaactgagggatgaggggccagaacatggccacaaaaagcccctgcgttgatactttccagaaatggctccacatcctctgaggcacggtcttcagttcacttctcgaccagattctccaaaaggagaataattccagaactgagagtaacatagcattgatgatgagaaaccgtgatgtccagtaatggacc

SEQ ID NO: 47 - DNA, 453 bp, Homo sapiens
tttaaaaatatcttaacacctttacttagatctcatctcatacttgtagcatttcttcaaatttactttgaaaaaagagcttcactgtgtgtggttgtcatacacattcttctacccaaccatggacctctttcttcctctcaggcgcacttcatctaatttttttagcactggcctggcctttttggaggaggtggagtagctcttcagaaaggcttcaaacacagtttcagtgttgggatgggtactgaggaaggccttctccaggacatagaggtctactcccttatcctctggaagtgctgaaatgaaactcagcccaaagtctatgagcacaatgttcagctgttccagggggggtttcaggagcatgttggaggtggtgagatcaccatgaatgaggtcttcatcgtgcattcgagccaaaacctgcccaattgtcttggctaagtt

SEQ ID NO: 48 - DNA, 411 bp, Homo sapiens
tttttttttttttttttttttttgtagtaaaatggccagatgtttattattttgttacattatttccattgcatattccacatctatttattttcacttttatttattatcattatttttcacaaaggtacaaggaatttcagaaacaacattaaaacaatcattcaaactgtttcaggcacggtttcaattaaaagcatagatttgatttctgacttcctgtttccttctatgatacaatctcaagttttgtttcaggaagcacaattattgtagcgttaaggtggatacctgccaaagctcatctcctagtgctgtcctcattctcagaaagttcctgagtcaacagaaaggggacgcccagggtatggaataaggagatgagagcatgctctgccaactggctgggac

SEQ ID NO: 49 - DNA, 269 bp, Homo sapiens
tttttttttatccagagagattaatacacagattaatacacaaaacttttgtaaatagcattccagttcaaagttgcttgtgatcatagccacgtgtgaaccgttagacaagtgtatgctatgccccaaaatgttttataattcttcagtgcagtttcttactgatgtttcccttaaaattaaggcttaatgaaagagaaatccatagtattatgaactgattttctttagcttctgaattaagtgcactctttccaaaatcaagtggt

SEQ ID NO: 50 - DNA, 174 bp, Homo sapiens
ttttttttttttttttttttttttttcaccatttgggacgtctttattatggatccgtccactcttccaggagcagtagcccttctaagaaaggggtgggaagaaaaccagcctacccttcaagctgacttaggatgcaatggtacagacaccagccttgggggagggttctcc

SEQ ID NO: 51 - DNA, 296 bp, Homo sapiens
  misc_feature (1)...(296): n=a,t,g or c
gatcagcagccgagaaaagtacatcaacaatcagcttgagaatttggttcaagaatatcgtgcagctcaagcccagctgagtgaggcaaagnagcgataccagcagggaaatggaggngtgacggaaagaaccagactcctctctgaggttnnggaagaattagaaaaggtaaaacaagaaatggaagaaaagggcagcagcatgactgatggtgctcctttggtgaagattaancnnngcttnncanaactgaagcaagaanctgtagngatggacattaganttggcattgtgg

SEQ ID NO: 52 - DNA, 409 bp, Homo sapiens
  misc_feature (1)...(409): n=a,t,g or c
cagcaactggtnactgtttatagaaatggggaaaggggaaattaatatttgtttaaaatgctttgagttgcctgatagacatccaaggggagcagtcagtttctaagcaaaagactgcgcttttgtggacagtcctgtggcagaggattggaatttgggagccattggcatgtaggtggcatttaaattatgtgactaggtgaggagggaagggttgttacctagggagtggacattgatggagaagactagtgactaagttctgaggcaagaccctccagcgtgtagatggcaagcagagcaggaagccatttatgactgaggaaggagaccactgatggccaggggagcngaaaccnggggccatgtaattgtcaccaaaattaaggtagcatgcatngggttttnt

SEQ ID NO: 53 - DNA, 332 bp, Homo sapiens
tttttgcacaatacttacgatttaaaaaaattacatgatggcttctttttcatcatttaagaagtgaacaaaaagtactggtcaacttttaaaatatgagtggtatgaacacaatgcaggaaagagactaaagttgaagaatttcttttcatcaggccacccaagtattgcaaaccagaaaaaaattttaatataaactgttgcaatccttacatctttatgcaatttatttggaaaagtcaaataattccattacaaatatatttgttaaaaaccttataaatttaacttataaattccaaattagtcaattatattatttcagagtctga

SEQ ID NO: 54 - DNA, 395 bp, Homo sapiens
  misc_feature (1)...(395): n=a,t,g or c
tttgttacttttacatgatctttattatttaagaaaaacctcttttaaccatttatataacagaaaaaaaatagggaggctggtagatcatcacatatatagtagctaaaatatgaaaggccagggaatttattattaatgaagtcataaaacagacttaaccaaaagtgtgtgctaggaaacaagcagtttcacttcagagacttcattgcaggaacccagtttccttatgtggaaaaaagtgattataaataacagttatctgaaaggtggttgagaggattaaatgagatcacctatgcaaacaaatacatgtaggtatgaaagaccatccgtcctgggggtngtggaaagtttaagtttccccnccagaacccttccctttaagggcctta

SEQ ID NO: 55 - DNA, 271 bp, Homo sapiens
  misc_feature (1)...(271): n=a,t,g or c
aatacacttctttgttataccacgaccaaattttctaatcctagtacaggccacaatgaaataggccaaacatgctaccattaaagtttgttgggatgagattgtagtaagtttactcaaagtattcaagttctaatttttaaggtgctgtagagaaacataaaagatttcactgtatcnaaaaatatgactgttttgatcttaagctatacattttatttttatctaactgattaagacctggcctcttaatgaggcacatttttgggca

SEQ ID NO: 56 - DNA, 472 bp, Homo sapiens
  misc_feature (1)...(472): n=a,t,g or c
ggtatcttaacttttattaatgttggntatcacggttaattaatttaaaatgggaaaataattcaagttgttagttgaaagaattagacaccagtgttttggtatcttaacttttattaatgttggttatcacggttaattaatttaaaattgtggtttattaatattttaagttactctcatattatattttattaattttttcttatttaaaaagcttgtctctgccacttcctgtgtgacctgggcaagtcattttacctctaagagcctcaaatttcctcatctataaagtggaaatataaatacaaagcttgcagaaatgtcaggaaaataaataaattaaatgccaaatagtcaatgagggatattaggcaaaggccagttttggtgggcattttaacctatggagactcagtgcctctgtgtgtcccattatcacctccaagacatcctggcaacaccaccgctg

SEQ ID NO: 57 - DNA, 501 bp, Homo sapiens
  misc_feature (1)...(501): n=a,t,g or c
gactttgtttaacctataaccttttttcctcccacatagtaggtagtaacatcacacggaaacagtgctctgaagacattctggacacatcgtatacagcacagccattcaaatcaacggcaacagaacgcacgaagaacctggttttctttcaaagcatgagcagttctcattttacaacatgtgttttaacataattcagaaagtgcaatctttgcatgacaaccagataattctcaaaggttactagtgagctgataaaattaacgtttggcaaggaggtcatggtttacaggtaggctgtccgctcaccaatgctcagaaaaattcagcagaacatacttttcatatttagatccgaagagaggtgagagacattctactcaaagtcatgggctgggctttctgtcctccaaacgaaattgggcaggncatttgcgtggtttcctctgggataaagttccccttatttaatcantggtgcaaaaaatcctnggcatt

SEQ ID NO: 58 - DNA, 430 bp, Homo sapiens
ttaaggttcttatccagctcttttatttcacagatgggaaaataaggcactgtccaagtaacacacagtgacagtggcaaagtcgtgcttgcttcccaggtccctgacctcagacaagggtgttctctcccattaaatgcttttttctcctcatcttgctccattttcctatcttgtggcaagagattaacaatctaaattccaatcctagttctgacactgaccaatgaaataaacatttaggctgggtgtggtggctcacacctgtaatcccatcaaggcaggaggatcacttgaggccaggagttcaacactagtgtgggctacaaagcaagacccccgtctctacagaaaattttgggtgctgtgtacctatagtcccagctactctgtaggcggaagtgggaggatcgtttgagcccaggagttg

SEQ ID NO: 59 - DNA, 545 bp, Homo sapiens
  misc_feature (1)...(545): n=a,t,g or c
cagttcagcaaatgtttattgggcacctacaataggcaaggcacagtaccagctgctgtgggttacaaagacaagaaggctaggctcaccctcgagaggcttacagtctaatagagagagacacactcacaggtaacaaaaatacaaggcaaaatgaggtgagctctatggcagaggcaaaaacaacgggagaacagcgagcagagatagatcagacatatctcagcagatcagatgttggatgcagggagtgacgtttcagccaggctctgggaggtgggtcggattcgcacaggtgaactggaaaaaagaggacactaaggcacaggcaaggtatagaggtgggaaagtgcaatgaatgttcagagaacagagatgcctgccttgaccaatacataggaggccaacaggataacagagggacctaagctggggaagtggtttcaggccagatggtgtgatcgctcgtagtaggatttcnttccttccttccttccttcctttttttccaatgaaacaagccttgatctacccccaggctggag

SEQ ID NO: 60 - DNA, 306 bp, Homo sapiens
aactttactcataaaattttatttgaacaaaacaatttttgaaaatataaaaatttcataagaactgctttcctgttagatacaaaatttattttaaaaataaataattatattgacctttaccatcacttgtctaaattttactcatgtttattgtcgaagacacagaggtgaattagaagagtatatcattatacattgtcaaataaagcgaaggtttccttatccaaatagagagaatatatatgtgattacttaatataaagcaaaagctatttctaccaaagaacagacatgcagttattg

SEQ ID NO: 61 - DNA, 164 bp, Homo sapiens
gcattattttaagatctttattattaagtaactcactggggttgtcaaagtatgttataaaattacacagataattagagatatatgttacatagaaatgctgattttacactctcttctgagtacaagcatttgattacagaggctcatagcacaacaaaatg

SEQ ID NO: 62 - DNA, 410 bp, Homo sapiens
taatttgtataatttattagaagcttcttaggaactatatttaagccaaatatctacataagttacaacagaaaaagactgacgccgcaaataccaaactgccaaataatatacacagatttgtcaatgcccataaaaaatgtgaagggctggggactgggagtggtttttctttttacaacaaaatgtacagattactaaaaactaggcatttagtccaacttttgacagcgttttacagctacaagttcacattaaacaaactatttcgcggagggcggtcgcgctgagcctaggcggccagagggtgcggggaaggggcacttcctttgtgtcagtgacaagtgggttatgttgaagactctttcctctccccagctcccggcctcccttcaaaaaaaaaaaaaaaa

SEQ ID NO: 63 - DNA, 270 bp, Homo sapiens
  misc_feature (1)...(270): n=a,t,g or c
cacggctcctgttttattgccttcgggtgtccggagcacctgactgccccggggtctaataatttaaggtgccgagaacaggtcaggacaaggggtcgcaaaanaggggctgggggcagntggttacaaaatatacccccaccccacaacaaacaggctagaggagaccagcctggctgtgtcggganggggcgggcagagggcgcccgaccagccttcagagagacagagccacggccagcgccccagagggagtggcggagacaggac

SEQ ID NO: 64 - DNA, 322 bp, Homo sapiens
  misc_feature (1)...(322): n=a,t,g or c
tttttttttttttttttttttttttttgggtggggagtacggantttattttattgttctgcgtctgggtttggttccttggacgtcacggttcctggatgggggtgggtgggtcccactccctaagtcatggtcccacgggcctnttgggatttttttccaggttcaaagtgcactgagaaagcttcacagttttaatacttcctagatgctcaactgaggcaaagtgacaaaatggccctcccacccccgcccgccacaaaantaaaatcccaagcccctggnagctgctgctcagcccttatgaaaaaataatacaaac

SEQ ID NO: 65 - DNA, 330 bp, Homo sapiens
  misc_feature (1)...(330): n=a,t,g or c
accacgggacnttttttaagtttattctagggtgagtgggtgcccaaggggggcagttgagtatggccgaggtcacctggtggcagggtgctcagggatggccacaggttctatagggccctgcagctgnaantctctagtcagttgggatgcttcaccttctgccccaccccaaggggtttgggcaatncatggatgtagtagttttcgtaattcgcagggatcagtgatgggcactgagcaggcttgattctcacacacatatgcagtggcctgggtcttccaaccgtcggagggtactcaggaaaggcancttgccggacaagaagc

SEQ ID NO: 66 - DNA, 424 bp, Homo sapiens
  misc_feature (1)...(424): n=a,t,g or c
ttttttttttgcagtttaaaacttatacattgtttatttctggtaattttctgtttaatattttgggacctcagttgaccatgagtaacacaaaccacagaatgcgaaacagtggataagagagggactactgtacatactttcgcctaagacagttctgtatattcttctgttaacggggtagcaaaagcatatagaaaggttttggggggatgcagtgcattgctcttctgtaatgacagtaatttacttcaagacattgcaggagaaggggttaaaggagtaaaggggaggaagagaaggattcatttcatgcctacctgtacagagacactttcttgctttctacttttttttttttttttttttttgagncggattctcactctgtgcccgggctgggagtgcagtggccanttctcgt

SEQ ID NO: 67 - DNA, 356 bp, Homo sapiens
ttttttttttttttttttagctcagccagttagttgttttattttgagttttgtttttttaaaaaaagaaaagctttgagaaaatgtattaaatatcagtaaagggcaggaacacacatggctagctttacaatagcaatctaaacatacacaaaggcaaacattgagtaaaatgctagggaaagacggcactttgggggcctactgcagttttccttattgcacataaaggttgtggataacgccaagtctttaatttttcacagttatactttaatgtcattttatataacgtttatttatataacatactataatgttaattttataaaaccaccagtttgctactgttgaat

SEQ ID NO: 68 - DNA, 285 bp, Homo sapiens
  misc_feature (1)...(285): n=a,t,g or c
gtttttcaacgttttatttcaagcattaaaaaaaaagaaaaaatcaattaccttcaatagaacagaaaatctgaaaaattaaataaggctaggcatggtagcagatggaaaggatttactatcctgtatgattttaatgacaatgnccctgccaaataatatcaccccgtgggttaagggggtacacaggaaggcagaagttgaaattagtttgaaggctacattgtttttttcccaatttacattgcttaaggatcagcaacgggaaggaacatcaatgccccc

SEQ ID NO: 69 - DNA, 257 bp, Homo sapiens
  misc_feature (1)...(257): n=a,t,g or c
attttaaagttttattatgaaaacacatggaattaacggtgttatccatgtatttgcaacagcagagaaagagtgagagtggaccatccccataggggacacttatcctttggctaaactaatataaataatggaaataacacctaatacaataatacagcacataaaagagattacattaagagangagacaggaactgcggagaggagtcctgagtatggnggagatgcggctcatggagaagcatccaggctca

SEQ ID NO: 70 - DNA, 129 bp, Homo sapiens
  misc_feature (1)...(129): n=a,t,g or c
ttnacagttaacatttattaaaacatgtcatacaaaagggcatgatctcttctataagaagaaaatattaaacattaacattcaattaagtaaaaccatgctgtacactgaagacagcaatatataaag

SEQ ID NO: 71 - DNA, 412 bp, Homo sapiens
  misc_feature (1)...(412): n=a,t,g or c
tataacttaaaatcgtttattttaaaggaaactttaaataaccaatggaaatgaaaaaccagccccacttgccatgaacagccccaactgttcggatttcattcgggcaggcggggtccacaagaggctctcttggcttaaagggagcccagcttggncangatcaggtgttaaggacacgtgagcaccaaattgagcctttctcagtgatgaggtcaaaaaatgaaagcgcgcaggaagggttctccccaggggaattctggggtgtcccaangtcatccggggccccgcacgcttcgggccatgctgttctggtctccagccctcatggccgtggcaattggacagcgtcaacttcctcactcagtgtgttcgcatcctgaccttgaggtnggggtgagggggacattga

SEQ ID NO: 72 - DNA, 211 bp, Homo sapiens
tttgtcaagagccaagacacaggtaatgcacgacattgattgctgcattttaccttcaaaatatttgtccttattgactgggtctccttaattaatgtacacatgtcattagaatgcagacggaggggactcaccatgaatatctggggttgattcccagatgtgtgttgcttctctattgcaagcagattcccttgtccggatttacttc

SEQ ID NO: 73 - DNA, 247 bp, Homo sapiens
cctggttcgtaaaactcatttattcaacaaagcagtacaagcctccccttcaatcaggacctgcctgcagggtcgggctacttcagtgtcttcagccaatgggagctagagggtttaatactttagtccacttcccttcatctctggccccatcgacaacatggggaaggggagtgagggcctggtagaagggtactaaggccccttatttcgttcgctggtagaactggaagactgctttctcctg

SEQ ID NO: 74 - DNA, 414 bp, Homo sapiens
aaatataagtaacagtttattaatttttttttttacagtgagatatggctatgggaagcaggtgatactatttgtttaagaaactgggatgccaactaacacgtggagttccccaagactttgcaatctccatttgtgagtttctgtaaaaaagggaacccagctagaggattcacagagaccttgaatgacaagcgacatactcgaaatctgcagctctcctcccggagcccagcgtgccaggagacacgctgcagtaaggcacttaccaagctcctttggatagagggaaagaagaaatcaatccaggcaacatgcaagtttcagtgaagtcagacattttatgggaatttaaagtcttgcctgttctcagtgcaccccagtcagttactgacatgtcagcctcagaaaccg

SEQ ID NO: 75 - DNA, 395 bp, Homo sapiens
aatgtacaccagaagtcaatatttaataacagtaagaattttttttgttacccttaagtgtaagttcccttccctctacataacttaagttaattttggagctaagcgaacttggtcacccactaataaggggcaagccaggaccctacggagcacagagccaagctctcaacaacacctggtaactctgtgctattcctagaatcactgctgggtgccccgcaccatgaccagggaatgggacatccacagtcctcaacattcttccaaatcccagggcagcagggaagccatcccaatcccaaccttttccatctgcttctccagggagtccagggggtaggcccgggacagcagctgcttcaggcggcccagctcccgctccttctcctcac

SEQ ID NO: 76 - DNA, 470 bp, Homo sapiens
tggaaatcagaggtgaatatttatttaattcatatataaattttacataatattcatggtgctataaatataggcacattttttaaaagtccagatacatccaaaaattaccccctcactgtagcctactccaatcccctcaagacggaatatctaacagtgtttggaaaacagggtccagaaaggccctgcccattaattttaaaactttctgaccatcaagaccattctttcctgcttcaaccaagcagagtcaacaaggatcatgtgttttcagggttttaattgcactagttgatgaattaagtaaatgcctctgcctgggtagtttgtaataggtttatgggtttggtttctcctacttagttcaagtcagagaaagaaaaaccaatatctatattcctattggccttctttaaatccctatgagatggcttaaaaggatgtcactgcaccagaggactcacttg

SEQ ID NO: 77 - DNA, 553 bp, Homo sapiens
  misc_feature (1)...(553): n=a,t,g or c
agaactgnannttttattcanacatttnctttgattnaaatacattacgtacanngtctacattggattagaagaatgacacagggggcagcaacactctcgcatcccagcctccantccctgacnctgngangcagggccgatcggtgggnannggnnnngtngttccatgagttcgnntcagaancctagncccggcattctgggcccctggctcttccagagtccacattcaaggcaacctgagcacaggcttgagggagagtggagaaaggccaggaaaggatgcccacactcttgcctgccaggcccaggaccagctctctcctacactnggacccaatttccttctggatcacagagctggtctggatcaagacaatgtggagatctggtgtggaggctgtggcaggtgangcagccgggctccctggttagacccccaggctctctttagcacnagatgggcactttaccaacaggtttgggtaaaaatgtctacngagagctatgcacaacctgggtncccttctgggctcctaaaagtcaaggg

SEQ ID NO: 78 - DNA, 476 bp, Homo sapiens
  misc_feature (1)...(476): n=a,t,g or c
agtattttcataatttatattgcttaaaattatgatttgcatgctaagatgcaaacttacgtgatatcttctttagacataatgctattaagagcacatgctttataaaataaaactggtctcattcatatcaggtgcagaaagccagtcctgaaagcatagactatcccttattctggctgttattaaggaaaaaattcatttaaaaaatacagtaaagattgaaaccaagtttactgtttcttgaacagaataggaagaaaatattttaaatggctgagctggtcattagactattactcatttatcttaaaggcagaaacttgtcaacccaactacgtgaaacagagaagcatgatttgcttaagcaggcgacattagagttaggcctctccacngggagcttccccgaccgtcagcacgtggcagacagggatgcggcccatcattccgcagggaagaaccggccgggccgg

SEQ ID NO: 79 - DNA, 562 bp, Homo sapiens
  misc_feature (1)...(562): n=a,t,g or c
tagaagaaaagagaagttactttattacaatttgttatctcatcccgaggtcagggccccttgcttagtgggaaaaaaaaccctttaggactgagtctcggaacagcacctgtcctaaacccaacttctctgtgatgcccggatttcttgattttgatccagtagctgctcattttcctgccttttacatttaggagattcaagctctgtcatttcctctagctgcccctgaagtccgtccttcctgcagggcccaactccacgtagagtgagtgcagccacacagcagtaaccagatagagcagcctcccctgcagacatgagcaaagaagggatccagagagccaaggctgtatcatagattcttgtggggtcaaaggggcagtcagtatgtcccggcccctcatccagtggtaccagaggatccagcagtcctggggtggcagtcagcaataaggcggcggccaccgttgggccacagtgagtgacacagcaagaaggaggcccagggagcaggcnacggacaagagcaggntcaccagagctagtgccagcaggaccc

SEQ ID NO: 80 - DNA, 580 bp, Homo sapiens
  misc_feature (1)...(580): n=a,t,g or c
ttttttaaataaattttttattacaatgacaggaagactctggatacaaacacatttgctaatataatcactccactggttacctaggcctagacgtacaaaaggacacccatatctcatcaggagaaagacaattttgagtttctgggtgtagtaccaagtggttatgatcaccacgtacgtggtctatccagttaactgtgtggcaatttgctatttcaagtcctctcataacagaaattactgaaatatgtggaacaccagtcaatataaagaattcatttttaaacagactagtgaatttgtgtcataaacacacttgcgtatggatattaggagagcattgcttgaatatctctaaaactatttttaggaattaaaagctttcatagttaatggtatgatattggccttcagaattcatattgataaaagcaaaccttagtcatttaacaggaatgtttaaattttagagattctaacatgcgatgccgaaaaatcctaacatttccacttagtaatgtcagggttgtgccagttctaatttcccatagctagtaacatcagaaaatatntatca

SEQ ID NO: 81 - DNA, 268 bp, Homo sapiens
  misc_feature (1)...(268): n=a,t,g or c
catctaatggctggttatttttacagatgccaagtttacaaaacatacaagtgcacagacaggtgtgggaggtagctcgaaatatacagagtgttcgcaacactagagacgtcttctggccgccatcaggggactcggaggtagggtaggcttggtgaggcccgtgnttcgtgtccgtggcacagcctcctgcaaaggggctgccctgctcccctgttcacatggtgccaggccgtgctccccaggtgcctccgggggtgctgaagaa

SEQ ID NO: 82 - DNA, 567 bp, Homo sapiens
tgtatgttgagagtctctttaatttttagagtaaatatgacacaatggatagctttagaacaagctaacattactacagttcaagcatgtgcaactggtacagttcagtagtacataaacgactcaaacaaatgtacgacaggtcagaaacttaagttacaaaatagagtcaatattacaattaacacagagaagtaaaaaccattgctctcagattctgcacacttaaaaaaacataaactttatacagtcattgaaattacgcatttctactcagattattagagcatattacaaacacacagaagcctaaacagttatggtcacattttggttttgttccagtggtgcacgatcacatgaaatgttacatccgttttgtgtgaaataaacatttggctgaagtgcaatagctgctgcattaaaaatatttccataaaaatgcttagattaaaatcttcctgaacattagggttctaatgttcaggattattttaagagtccttatgaagagtccttaaaattatagaaatagatgtagttaggaatttcagtgtgtttgctgtt

SEQ ID NO: 83 - DNA, 433 bp, Homo sapiens
tcttactagtgctgatttattacaaaggatattttaaaggacacaaatgatgaagccagttgaagagatacacagggtgaggtttggaagggtccttgtggagttggggtgcaccactctcctggaacatggatgtgttcgccaacccggaagctctccaagtcctgtctttcaaggagttttctggaggctttatcacgtaggcatgattgagctccagctctactccccacgccagaggatggggaatggggctgacagcacaacgcttccaaccataggtctttttggtgaccagtccccaaataaggagcccaccaagagtcacctcatgagaacaaaggacgcttctatcacccagaaaattccaagggatttaggagctctgtgtcaggaaccaggtttaaggaccaaatgttagaacaaaagatgt

SEQ ID NO: 84 - DNA, 394 bp, Homo sapiens
cggagagacaaaacaagaactagagttttaatgataataaaagcaataataataaaagcaataacaataaaaacaagatcagactctcactggggtaggcaagggactgaggaggtgaaacaacccgtatggtgtcccagcacggcacctgctaaggagggagggtgggaaagcccaggccttcgttgcgggtacaggaggatgcaggagagggctgaggtgggggaggaacaactggtgtactgggagagagatttgggacgagggggaaccatcagcaaaaaatgaagccaggaatcacagtaagggcgcaagggctgaggccagttgtttccataaagaagactcaatcattacaaaaataatttttagtagttaaaaaacacacataggg

SEQ ID NO: 85 - DNA, 527 bp, Homo sapiens
tttttgtagggatggggtttcactgtgttgcccaggctggtcttgaactcctggacacaagcaattctcctactttggccttccgaggtgctgggattacaggtgtgagcaccatgctcgacctaaatgttcacttttaatcagggcctatagccttgaattctatagtaatgtggttcactaagtcctccctaatagatattttcacactttctaaatggaggtaggactgagggactgtactaaatagcagacaagcaagaagagcagccttcccctaccaatacctccagcaacagtccctagtaacaacagtagtaacaggtttttgttttgttgttgttttttaagagaggcagcagtgtgttcataatcctaatgaagaaaaatggattgggttgcagggaactgaggcatgagacaaagcaagaggcagggattaaagaaatccacagggctttctgctttaatccaacaaaatcacaggaaaattactcaattatgaatttggagtcagggatctctgc

SEQ ID NO: 86 - DNA, 139 bp, Homo sapiens
tttgtgttatctctctttattgttctgcagcctctttaaaaactttgccatgagatcatttccacaataaaatacatttcttccataaagccatgtgtttatttagtcaactattgtttgtgaggacagctttgctgta

SEQ ID NO: 87 - DNA, 384 bp, Homo sapiens
ttttttttttttttttacattaaaatgtaatttatttgcagaagaattgtctccagccctgtgcgcttgtgggattgggaaaacatcgtttttaaacacaaaggatcaagaagtactccttggagcagcattaataggcaccaatactacgaactagaatttagagccttgccactggccagcgctggggtcagtcgggagcatgccagcaaggctgaccctcagtttcactgaggccggagtcataagcagcactttaaagatccctgggtaatttggatgcattttgagatgtgagccgcatagatttaaggtactttagcattctgcagctttcacttattgattgtatgattcccaccgtctgaccccagcagtcttcac

SEQ ID NO: 88 - DNA, 403 bp, Homo sapiens
cgttaaaaggcaagtacatatattttatgtgttcaagtacatatatttatgtatatttatgtatgtatctgtgtatgtatccacatgcagaaagataatataccctgatacaaaatatacatgttaagtctaagaagtcctgttactcaaagaaatattttcaaatattattagataattcacttgtcgatcatcctttttcagcatctaaagaaatttcagacacaaaatatgcaactgcatttagaataaacagatggaaaagctattgtagaaaaaaatataggtttttagaaaagttggaaagattacaggcaaaaaataagaacatatattaaattacatttgcaagtttcaaatatttgtaactcaacacaaaaacctctaaaagtatgttgggtgc

SEQ ID NO: 89 - DNA, 283 bp, Homo sapiens
cagctggagcgtatgactttattgatccaggacatgtatttgcagatctgggtgtagacagctggatgctgggcagagcacaggggtaaacaccccacgagaggatgccttggagggtctcgtcacagaccagggggcctccagagtcactctggcaagggtcctggccccggtccagtccagcacatatcatgttgttggtgaccacgccagggtagaagacctcacactctttagggctcaggatagtgatgctggagcaggtcaggcccttgtggaactt

SEQ ID NO: 90 - DNA, 524 bp, Homo sapiens
  misc_feature (1)...(524): n=a,t,g or c
aagacctttaataatgcccacgtgccctaaggttggccctcttaactccctcagctctttctggctttaagcatcaccccaggtgtgcagtttatgtcagagggggccatcaggtagggaaacttatcagctgctctaagagaaaaggccgtccctgctattatcagtgggcacaggctggagctcagccagcaggggctacagtcgggttacctggagacatgatcccctggtcctctgagggcctaggcaggacatgggggaggacacggtnccccgggacagagtctctggccagggagcagcctttcaggttgctcttgtgtgctagaaaaaaatattttctctatgtgccatgtcatgganaaagncaaaagcactgagttaatggggatcttggaagcttttagccacaggttcttctgcctgtgaagagagcttttttgcatgttgaacanctggnagcaggaggttgaattggcagtctttttccagnggccacancttcanccagtcacntttcc

SEQ ID NO: 91 - DNA, 488 bp, Homo sapiens
  misc_feature (1)...(488): n=a,t,g or c
gcgaccgcagtngcaactccagctggggccgtgcggacgaagattctgccagcagttcggtccgactgcgacggcggcggcgacagtcnagggtgcagcgcgggccctnggggtcttgcaaggctgagctgacgccgcagaggtcgtgtcacgtcccacgaccttgacgccgtcggggacagccggaacanagcccggtgaaggcgggaggctcgaagatcccctcgggaagggcggcccgagagatacgcaggtgcaggtggccgccggatcccagccgcacttctggcgtgagtatccggactgcaggggccgggacgaggtcggtgttcgaatcttcccagctctggttggcccgcaacctgggttaagcaggtcctcgtagcgtttccgcaactctccggaatctggagtcttccggtgtgcaactctgaatggtcccgggaaacttgcgcggctcgcatcggntaaagacagggtgcccccat

SEQ ID NO: 92 - DNA, 415 bp, Homo sapiens
aaatatgctctgaattttatttacagaagtataccttacataattattagaggctataaatagcttaaaataagtttccttgactctgaaaaacaaaataaggatcagcaacattttaagcaaaaaggttaaaaagtccattttgttaactcttgttttgcttgatattcatgaatattttagctcttcatgagtcctgtacatttttcctttattccaatgtcataatctccaaagttatcagaaacttgcatttgagagcatgtgtcaaagtcctatagctgattataaaccatcctttaaagaggattaaaacaagaccgatttttgaatggtgaaatgtccaaggtagttagtcaagaacatgactgacaaattttattaatttctgtgttttacaataacttaacataat

SEQ ID NO: 93 - DNA, 546 bp, Homo sapiens
  misc_feature (1)...(546): n=a,t,g or c
anntatttttgcaaaagaagaaaagtttttttganctccttgaatgtagcacacaaaaaaagtgatggttcccccaggctccatcagcaatagtaaagggcaggaacgtagagatttctttttccaggcccaggcctgtgaaaaacgatggctaagtnttagtccttagcagggccgacggatggtctccattcctggntaaccctctggaatctgggagcatgagtatctccaaganttcatttctattcagtaaagatggggaggggantcccactgttacttgttgaactggaaagattagaccccatgctctgagggtgcgtccactgccacttggttctgttgggccgctgctctcctcgactgaaacactgggaagaagggcacaggggttttactgggagatgtaagctccttngcatagcttgcagcccttcggcatataacgtgcccgtngctgctgaggggagagatgggcccagtttgctgggtaaggggtcccatcatgggagggcaggctnggaaagaaatggggtnggccca

SEQ ID NO: 94 - DNA, 1201 bp, Homo sapiens
agtcccagctcagagccgcaacctgcacagccatgcccgggcaagaactcaggacgctgaatggctctcagatgctcctggtgttgctggtgctctcgtggctgccgcatgggggcgccctgtctctggccgaggcgagccgcgcaagtttcccgggaccctcagagttgcacaccgaagactccagattccgagagttgcggaaacgctacgaggacctgctaaccaggctgcgggccaaccagagctgggaagattcgaacaccgacctcgtcccggcccctgcagtccggatactcacgccagaagtgcggctgggatccggcggccacctgcacctgcgtatctctcgggccgcccttcccgaggggctccccgaggcctcccgccttcaccgggctctgttccggctgtccccgacggcgtcaaggtcgtgggacgtgacacgacctctgcggcgtcagctcagccttgcaagaccccaggcgcccgcgctgcacctgcgactgtcgccgccgccgtcgcagtcggaccaactgctggcagaatcttcgtccgcacggccccagctggagttgcacttgcggccgcaagccgccagggggcgccgcagagcgcgtgcgcgcaacggggaccactgtccgctcgggcccgggcgttgctgccgtctgcacacggtccgcgcgtcgctggaagacctgggctgggccgattgggtgctgtcgccacgggaggtgcaagtgaccatgtgcatcggcgcgtgcccgagccagttccgggcggcaaacatgcacgcgcagatcaagacgagcctgcaccgcctgaagcccgacacggtgccagcgccctgctgcgtgcccgccagctacaatcccatggtgctcattcaaaagaccgacaccggggtgtcgctccagacctatgatgacttgttagccaaagactgccactgcatatgagcagtcctggtccttccactgtgcacctgcgcgggggaggcgacctcagttgtcctgccctgtggaatgggctcaaggttcctgagacacccgattcctgcccaaacagctgtatttatataagtctgttatttattattaatttattggggtgaccttcttggggactcgggggctggtctgatggaactgtgtatttatttaaaactctggtgataaaaataaagctgtctgaactgttc

SEQ ID NO: 95 - DNA, 760 bp, Homo sapiens
agagccggcgccgtcaccgcccgcattgccgctcccagtcccgcgctcggcacgacatgaaatcccccgacgaggtgctacgcgagggcgagttggagaagcgcagcgacagcctcttccagctatggaagaagaagcgcggggtgctcacctccgaccgcctgagcctgttccccgccagcccccgcgcgcgccccaaggagctgcgcttccactccatcctcaaggtggactgcgtggagcgcacgggcaagtacgtgtacttcaccatcgtcaccaccgaccacaaggagatcgacttccgctgcgcgggcgagagctgctggaacgcggccatcgcgctggcgctcatcgatttccagaaccgccgcgccctgcaggactttcgcagccgccaggaacgcaccgcacccgccgcacccgccgaggacgccgtggctgccgcggccgccgcaccctccgagccctcggagccctccaggccatccccgcagcccaaaccccgcacgccatgagcccgccgcgggccatacgctggacgagtcggaccgaggctaggacgtggccggcgctctccagccctgcagcagaagaacttcccgtgcgcgcggatcctcgctccgttgcacgggcgccttaagttattggactatctaatatctatgtatttatttcgctggttctttgtagtcacatattttatagtcttaatatcttgtttttgcatcactgtgcccattgcaaataaatcacttggcca

SEQ ID NO: 96 - DNA, 1866 bp, Homo sapiens
gaaaagacaattcttttaatcagagttagtaatgtggacagtacaaaatcgagagagtctggggcttctctctttccctgtgatgattaccatggtctgttgtgcacacagcaccaatgaacccagcaacatgccatacgtgaaagagacagtggacagattgctcaaaggatatgacattcgcttgcggccggacttcggagggccccccgtcgacgttgggatgcggatcgatgtcgccagcatagacatggtctccgaagtgaatatggattatacactcaccatgtatttccagcagtcttggaaagacaaaaggctttcttattctggaatcccactgaacctcaccctagacaatagggtagctgaccaactctgggtaccagacacctactttctgaatgacaagaaatcatttgtgcatggggtcacagtgaaaaatcgaatgattcgactgcatcctgatggaacagttctctatggactccgaatcacaaccacagctgcatgtatgatggatcttcgaagatatccactggatgagcagaactgcaccctggagatcgaaagttatggctataccactgatgacattgaattttactggaatggaggagaaggggcagtcactggtgttaataaaatcgaacttcctcaattttcaattgttgactacaagatggtgtctaagaaggtggagttcacaacaggagcgtatccacgactgtcactaagttttcgtctaaagagaaacattggttacttcattttgcaaacctacatgccttctacactgattacaattctgtcctgggtgtctttttggatcaactatgatgcatctgcagccagagtcgcactaggaatcacgacggtgcttacaatgacaaccatcagcacccacctcagggagaccctgccaaagatcccttatgtcaaagcgattgatatttatctgatgggttgctttgtgtttgtgttcctggctctgctggagtatgcctttgtaaattacatcttctttgggaaaggccctcagaaaaagggagctagcaaacaagaccagagtgccaatgagaagaataaactggagatgaataaagtccaggtcgacgcccacggtaacattctcctcagcaccctggaaatccggaatgagacgagtggctcggaagtgctcacgagcgtgagcgaccccaaggccaccatgtactcctatgacagcgccagcatccagtaccgcaagcccctgagcagccgcgaggcctacgggcgcgccctggaccggcacggggtacccagcaaggggcgcatccgcaggcgtgcctcccagctcaaagtcaagatccccgacttgactgatgtgaattccatagacaagtggtcccgaatgtttttccccatcaccttttctctttttaatgtcgtctattggctttactatgtacactgaggtctgttctaatggttccatttagactactttcctcttctattgttttttaaccttacaggtccccaacagcgatactgctgtttctcgaggtaagagattcagccatccaattggttttaggtcttgcatatcagttttattactgcaccatgtttacttcaaaaagacaaaacaaaaaaaaaattatttttccagtctaccgtggtccaggttatcagctctttaagagctctattaattgccatgtttacaaacaaacacaaagagagaagttagacaggtagatctttagcagtcttttctagtttccctggatttcactgatttattttttagggaaaatgaaaagaggaccttgctgtccgcctgcactgcttcctggtaaactataacaaacttatgctgcc

SEQ ID NO: 97 - DNA, 1488 bp, Homo sapiens
cgcgacggctgagcaaggactctccagtcctcagtcaccttggacaaagaagtgtggatcctcagattccatcttttccaactccaaggtgccatggcagagaaggtgctggtaacaggtggggctggctacattggcagccacacggtgctggagctgctggaggctggctacttgcctgtggtcatcgataacttccataatgccttccgtggagggggctccctgcctgagagcctgcggcgggtccaggagctgacaggccgctctgtggagtttgaggagatggacattttggaccagggagccctacagcgtctcttcaaaaagtacagctttatggcggtcatccactttgcggggctcaaggccgtgggcgagtcggtgcagaagcctctggattattacagagttaacctgaccgggaccatccagcttctggagatcatgaaggcccacggggtgaagaacctggtgttcagcagctcagccactgtgtacgggaacccccagtacctgccccttgatgaggcccaccccacgggtggttgtaccaacccttacggcaagtccaagttcttcatcgaggaaatgatccgggacctgtgccaggcagacaagacttggaacgtagtgctgctgcgctatttcaaccccacaggtgcccatgcctctggctgcattggtgaggatccccagggcatacccaacaacctcatgccttatgtctcccaggtggcgatcgggcgacgggaggccctgaatgtctttggcaatgactatgacacagaggatggcacaggtgtccgggattacatccatgtcgtggatctggccaagggccacattgcagccttaaggaagctgaaagaacagtgtggctgccggatctacaacctgggcacgggcacaggctattcagtgctgcagatggtccaggctatggagaaggcctctgggaagaagatcccgtacaaggtggtggcacggcgggaaggtgatgtggcagcctgttacgccaaccccagcctggcccaagaggagctggggtggacagcagccttagggctggacaggatgtgtgaggatctctggcgctggcagaagcagaatccttcaggctttggcacgcaagcctgaggaccctcccctaccaaggaccaggaaaagcagcagctgcctgctctccagcctctggaggaactcagggccctggagctgctggggccaagccaagggcctcccctacctcaaaccccagctgggcccgcttagcccaccaggcatgaggccaaggctccactgaccaggaggccgaggtctctaactcttatcttccacagggtccaagagttcatcaggacccccaagagtgagtgagggggcaaggctctggcacaaaacctcctcctcccaggcactcatttatattgctctgaaagagctttccaaagtatttaaaaataaaaacaagttttcttacactgg

SEQ ID NO: 98 - DNA, 10476 bp, Homo sapiens
ggatcctccctcctcggcctcccaaagtgccaggattacaggagtgagccaccacacccagccccatctcttttcatcatggtactaattcctgcccgtccacccacaaaagcactgtagtcgttcccgagtatagaggcctgtgagcctccactagggagagggctcctgcagagatcagataaattgatcacaatggctggggtggtggcaatgtgctaatgctctctttcttccactcaagatatcctctgtctccctcagcctgtgagctttttctccagtgtgctctgccagtgggggccctgcctgagagcccctgcagctgcagaggacagtttctttctgctgaaccatcgcagctatgccccagcccctaccctggaggggtccccaggggccatgggcagcacctcctgtatagggctgtctgggagccactccagggccacagaaatcttgtctctgactcagggtattttgttttctgttttgtgtaaatgctcttctgactaatgcaaaccatgtgtccatagaaccagaagatttttccaggggaaaaggtaaggaggtggtgagagtgtcctgggtctgcccttccagggcttgccctgggttaagagccaggcaggaagctctcaagagcattgctcaagagtagagggggcctgggaggcccagggaggggatgggaggggaacacccaggctgcccccaaccagatgccctccaccctcctcaacctccctcccacggcctggagaggtgggaccaggtatggaggcttgagagcccctggttggaggaagccacaagtccaggaacatgggagtctgggcagggggcaaaggaggcaggaacaggccatcagccaggacaggtggtaaggcaggcaggagtgttcctgctgggaaaaggtgggatcaagcacctggagggctcttcagagcaaagacaaacactgaggtcgctgccactcctacagagcccccacgccccgcccagctataaggggccatgccccaagcagggtacccaggctgcagaggtgccatggctgagtcacacctgctgcagtggctgctgctgctgctgcccacgctctgtggcccaggcactggtgagtctcccccagcctcccctctcctaggcagctccaccactcactgagcactgctttgtgctaggcattaacccaagtctgtcctcattttaaagacaaggcagctggggttcagagagggttcagagcttatccaaggtcacacagctggcgggtccaggagcaggtggaacccagagctgtctgacgtccacatgtttaatggcctcacactcccagcaaaactgggtctagagggtgggtgaaatcatgatgccaggtgtgtagcctggatcctgattaaggttgctctggccccaaaccacagctgcctggaccacctcatccttggcctgtgcccagggccctgagttctggtgccaaagcctggagcaagcattgcagtgcagagccctagggcattgcctacaggaagtctggggacatgtgggagccgtgagtaccaccaaggatgcatggcaactgggggtctgaaatgaagggtgctgggtgggctctggatgggcaggaggagagtggagcccccataggggatggatgagatgaaatgggatgagatgaaatgagataggataaaatggaatgggatggatgcgatgggatacgatgacatagaatagatggagtcggatgaatgggatgggatgggatggatgggaggggaagggataggataggatgacatagaataaagatggatgggatgggatgggatgggatgggatgacacagaataaagatggatggattgggatggatgaatagaagagatggatgggataaattgatatggatgagatgggacaagttgggctggtgggcagctgcatgtgccttggagtgctctgttggcctcttcctaagagaacctccccattggagctgggagcctcccccactcatgtgtcctccaccttggggcccctccctccccaggatgacctatgccaagagtgtgaggacatcgtccacatccttaacaagatggccaaggaggccattttccaggtaatgatgcccagatcctggatgaaggttggggcccaagagatgagggacagagcagggaagagctgagccccctaaaggggccatttccaggctgaggaggaggcctgggtgcctgggaagtcccagctcctcctggctgggagcaggtcatggccctgagctcaatagcacagccagagatggtcttccctgaggggaagggcccctacatgtgcccaactacttaactccttggcactcgtgaactccagcaccctgggggattaggggtcagtctgccctggtggggccttgtgtccagggacttgggcggggtagacctcagagaggcccagctgacggccccctctggcctcccaggacacgatgaggaagttcctggagcaggagtgcaacgtcctccccttgaagctgctcatgccccagtgcaaccaagtgcttgacgactacttccccctggtcatcgactacttccagaaccagattgtgagggctgcaagctcacctcctgcctgcctccccacgcaggcccctgtgcccacccatgggggagccacacacacagcaccccagccagccagacacacacacacacacacacacacacagcacccaagccggccagacacaaacacacagcaccccagccagccggacacacacacacacacacacacacaacaccccagctggccggacacacacacacacagtaccccagctggccggacacacacacacacagcaccctatccagacacatacacacacacagtaccccagccagctggaaacacacacacacacagcactccatccagacacatacccacacagtaccccagccagccagacacacacacacacacacacacacacacacacacagagcacacacacagcaccccagctggccacacacacacacacacacaccctgtccacaaagggcctaggaaactacgtgcccttcagccatgcacccgaccatgggcccccaggttcaggtgcacacggtgggcctgtacgctcacacacccttacaccctcactctcacacacatgcttacacacttattcattctcacatatatgctcatgctcattcacacacaatcccgggccacctgccctaaagtccccacacagccctatctttgccttttgtccccccacatagagttctaaaccacagcacccccactaggcctgcttcctcccattccagtggtccctgagcccttgggccggcctgaataggggtgggcttccctcccagaccctaacactcccaccctgtgctgtgccccaggactcaaacggcatctgtatgcacctgggcctgtgcaaatcccggcagccagagccagagcaggagccagggatgtcagaccccctgcccaaacctctgcgggaccctctgccagaccctctgctggacaagctcgtcctccctgtgctgcccggggccctccaggcgaggcctgggcctcacacacaggtgagggaggcccccacagccagtaaagtggagatccagagggctagagccacctccgaagcccatgggcactgggccctgggagaggcagagccgggaaggtgataggaagctccaggcagggcctaagggaggagggagagaaagggaggaagagagaggggaggagagcctggaggactcttctcccagcacccagcctggcctccacctgattctttccccaggatctctccgagcagcaattccccattcctctcccctattgctggctctgcagggctctgatcaagcggatccaagccatgattcccaaggtgaggcatccagggcctcaagagcccaggagcacacgcatacctgtagctccctgcagctcccacctctctcccaactcacacccccgtcagacccagctggctgccagaagttaggaggggagagagccgcttgtgcattgcccccacccagggaccctgggctcaggctcaggcctggtaggtgccaggtacagttcatgcaacaaacattaagcccccactgtatggaggtgccagccaggagccaaagtacaaaaacggacaagacgcagctttgtcctccagcagctcaccatctgatggagaaagatccccagaggtctctgtagaaaggttgctttgatctttcaagaggggaatttccacagatagattccccatccttgcctgagtccaacttggagtcttccagacctgcagtggctattgtccaatggccccgccagcccagggctaccttgcccaaattggggcccaaatgaggaaaggccctgccccctcagcctttcccagattgggttgcgtgggccaccaggggcacaaggcagcaggtgaggttcctgctgaggcaggtggttcacttgagcccaggagttcaagaccagcttgggcaacatggcgaaaccccgtctctactaagaatacaaaaattagccagatgtgacaggtgcctgtagtcccagctactcgggaggctgaggcaggagaatcacttgaacccaggaggcggaggttgcagtgagccgacatcacgccactgtactctagcctgggtgacagagcaagactctgtctcaaaaaaaaagaaagaaggaaagatcactgcagagattgcagtgagaggtgatgggacagggacggagctgagggctggcctggggatgcatttgggaggtgggcccactgctatgggcatggatgggcctggagcgtgaggaccagggaggactccaaagtgacttttacacactggccagagcaaccagccctctgtaatgccagcagctgagatggggagactaaagaagaaaacaggtttgagcaaaaaaacagagagctccctcctggccatgttgagttcaagatgcctgtgtgaagtgcaggagaggagagtcaggcaagcagctgaatcccaagcattgggggaaggtcaggtccaccatgtcagtctgagagtcactagctgtgggccagagcctttggggccagacgtaggtctgaagctggctcctacactcagtgaccctgtgtgagtcccctgcatcccctggactctctgatccccagtgtccttatttgtgaatagccttgccctcccttctagaagagaatgagggaatgcgtaggaagtgcccagctgggtgctgggcagagagtggaggcttgccaagtgaaggtcccatgctggcctctctccgcccccgccccagggtgcgctacgtgtggcagtggcccaggtgtgccgcgtggtacctctggtggcgggcggcatctgccagtgcctggctgagcgctactccgtcatcctgctcgacacgctgctgggccgcatgctgccccagctggtctgccgcctcgtcctccggtgctccatggatgacagcgctggcccaagtgagcccactgccccctccttagcccaatgcccgctctcctcctccccctaccctgccactgcatgaccctctccctctgtggtcccactgcaatgcaccaaggaggacagaaaccaaacacctctgtagggtggccttgcctgctttccccctaatgctcacatctccagggtcgccgacaggagaatggctgccgcgagactctgagtgccacctctgcatgtccgtgaccacccaggccgggaacagcagcgagcaggccataccacaggcaatgctccaggcctgtgttggctcctggctggacagggaaaaggtatgggctgggcacatggggactcatggtcagggcccgttcaaggcagaaggctgagcccaggaaaggctttgcagccagagacacctaggatgggccagaatggagcacagacaggcagacaggatgtggggcagacaatggtgggactgtaagttagggcagagcctgctaagggttaggagtcgcctctggacaaagggctgtgggctccagaggaccagcaggccctcttcacgggctgagtgagcaccaggcaagccttcagaggcctggttatctaccaggagatgagtaatgctagggccagttcaagccaggaaagggactagccttctctccagggtcctgatccctttactgcccccacactcctcaaggtgtgactcactcaggacaaacccattggcaaaaggagagggctggacttgaaggtcctagggcccttgccaatactcagtcaatgacaggaaattcccttttttttttttttttttttttttttgagatggagttttgctcttgttgcccaggctggagtgcaatggcacaatcttggctcactgcaacctctgcctccgggttcaggcgattctcctgcctcagcctcttgagtagctgggattacaggcatgtgctaccaggcccggctaatttttgtatttttagtagagacaaggtttcaccatattggtcaggctggtctcgaacccctgacctgaagtgatctgcccgccttggcctcccaaagtgctgggattacaggcataagccactgcacccggacaggaaattcccttcttaaagcgagatcctgtcctgaggaaagccagctgatgctcttcccaggaggcagctgtccacactgtgctccctgctcagcaactcccaagcctcccgactgcccatcacatctggtctcaaggaccagatgaacgttaaggttccttctagaactgaaatggaggtggagggaggggagggtggtggctgagattccacccctctgcctgagtcctccgtctccagtgtcgcctgcttttctgatggaagtcctccatttcagcctggctccagtttgttaagggtttcaactgcagccagaggtgttccgtgagggctgatggaggagtcgggagggagccctagagtgatccagagatgtggagaggcccaggaccacacgacaggagagtcctgcaaagggacctccacagctgtgtgtctccctcagtgcaagcaatttgtggagcagcacacgccccagctgctgaccctggtgcccaggggctgggatgcccacaccacctgccaggtacacccaacccctcccaagttggtcctaggacttcccttggctcccagagcccccaccctttgggcccgtgatcctcagaggcctcactcccctgggtccaaggtggtcccaggtgcacgggccagggactgggaggcacccctctctgtttcagtgtaaaaaatcatgagagcatggaaaagggggatgggaagggagggatggcctgaggagtgcggctggatgtccattataggatggggctgtgttccctggccagtgtgtgctggtggggtgggggtacaaagtgggtgttctggagtgaacatctcacctcctcaggctctaaaccctaaggcctgtggctcagggagtggccgaggggtctacagagtcacactggtagcacccactaggcgggaggtggagtgagtgctgttctttcccggaagagctgggtgtggggagctgagggggcccaggcctcagccctggtgctgtccctgtgacaggccctcggggtgtgtgggaccatgtccagccctctccagtgtatccacagccccgacctttgatgagaactcagctgtccaggtgagtccaggcccccagttgcggggaggtaagggggcaggtcctgaccatcagggcatgggaggcccttctgctccccaagcaggaagaggcggccactcctgccggctgctccatcctccctctcaccgcacagctggaggctcctgagggcttctggctggccatcaggaaaacaccctttccggaccccgagcactgccccgcccagaaccccagtcactgagtgcccaacccccagcttcccccccaaccccccgccctgccctgtcccaggcctccctctcagagcttgccccagggactctctggccctcagggttcaatgtattctgaccaaggccaagctttcctggggctcagggaaaatcacactttgctacccgaagctgtatcccctcagatgccaggaaggccgtgatcatctgactccaccctcctgagacacattctctccctgactgtcctgttctaagtcagcggagcaccttaggatggaggggtggaggcgaggccagatgcagcctctgtgaacaggtgcctggaggctgggaaatgaccctgagagggcaggacacagcaaccgtgggcttaaggtgaccttgagagcaagcttggcccactttacaattctgttcagagccagcccctaacatggtggtcatttattcatttgttccctcattttaaaaaatgtaaggccaggcatggtggctcacgccggtaatcccagcactttgggaggccgaggcaggcagatcacctgaggtcaggagttcgagactagcctggccaacatggcgaaaccctgtctctactaaaaatattttttaaaaattagctgagcatggtggcaggtgcctgtaatcccagctactcaggacgcttaggcaggagaatcacttgaacctgggaggcgaaggttgcggtgtgctgagatcgtgccactgcactctagcctaggcaacagagcacaactctgtctcaggaaaaaaaaaaaaaaaaaaaaaggtatttctttgctgggcgcagtggctcacacctgtaatcccagcactttgggagaccgaggcgagtggatcacttgaggtcaggagttcaagaccagccttaccaacatgatgaaaccccgtatctactaaaaaaaaaaaaaaaaaaaaaaaaaaaattagccagatgtggtggcacacacctgtaatcccagctacttgggaggctgaggaggagaattgcttgaacctgggaggcggagattgcagcgagccaagattgcgcctctgcactccagcctgggtgacagagtgagactccgtctcaaaaaaaaaaaaaaaaaagtagtgggtgcctgtggccaggccacatcctagggtaggggctatggctgagccctgccctcctggagctcacagccaagtccacttcttccatctgaggcggggaagccagccctgttcctgaaaccctgcatcacaagcccctgtgggaggcagtggggaggggaggtcctcccccactcagacctgacccacagggaccagtttaatgtgtccttgccccagtgatgacagctggggatctgggggtggggagtcacccaggacccgggcagtcgcctttccccagctcctagggctcccggccttccctgctgaaacagcaagaccagtgggttggcgtgggaggcctgggcttcaaaccacctctgctatcacctggctgtgggtccccaggcaggacatacacacagtccctctctggccctcatcctcctcagctgcaaaggaaaagccaagtgagacgggctctgggaccatggtgaccaggctcttcccctgctccctggccctcgccagctgccaggctgaaaagaagcctcagctcccacaccgccctcctcaccgcccttcctcgggagtcacttccactggtggaccacgggcccccagccctgtgtcggccttgtctgtctcagctcaaccacagtctgacaccagagcccacttccatcctctctggtgtgaggcacagcgagggcagcatctggaggagctctgcagcctccacacctaccacgacctcccagggctgggctcaggaaaaaccagccactgctttacaggacagggggttgaagctgagccccgcctcacacccacccccatgcactcaaagattggattttacagctacttgcaattcaaaattcagaagaataaaaaatgggaacatacagaactctaaaagatagacatcagaaattgttaagttaagctttttcaaaaaatcagcaattccccagcgtagtcaagggtggacactgcacgctctggcatgatgggatggcgaccgggcaagctttcttcctcgagatgctctgctgcttgagagctattgctttgttaagatataaaaaggggtttctttttgtctttctgtaaggtggacttccagcttttgattgaaagtcctagggtgattctatttctgctgtgatttatctgctgaaagctcagctggggttgtgcaagctagggacccattcctgtgtaatacaatgtctgcaccagtgctaataaagtcctattctcttttatgagaaagaaaaagacaccagtcctttaaagtgctgcagtatggccagacgtggtggctcacacctgcaatcccagcaccttaggaggccgaggcaggaggatcc

SEQ ID NO: 99 - DNA, 577 bp, Homo sapiens
caccactgctttagaggccagatttttctggaggggattcctctacacatgctacctccagttagcaggaggggaaggaagggttgggagtcttggggagtctcaccatcaactcctcctcctgctgctgttccatttgcctcagacatggagttggagctgctgcggggcagccaggccatcatgctgcgctcagcggacctgacaggactggagaagcgtgtggagcagatccgtgaccacatcaatgggcgcgtgctctactatgccacctgcaagtgatgctacagcttccagcccgttgccccactcatctgccgcctttgcttttggttggggggcagattgggttggaatgctttccatctccaggagactttcatgtagcccaaagtacagcctggaccacccctggtgtgtacctagtaagattaccctgagctgcagctgagcctgagccaatgggacagttacacttgacagacaaagatggtggagattggcatgccattgaaactaagagctctcaagtcaaggaagctgggctgggcagtatcccccgcctttagttctccac

SEQ ID NO: 100 - DNA, 1717 bp, Homo sapiens
aagcttcagctctttccttcctcaatccttctcctggcacctctgatatgccttttgaaattcatgttaaagaatccctaggctgctatcacatgtggcatctttgttgagtacatgaataaatcaactggtgtgttttacgaaggatgattatgcttcattgtgggattgtatttttcttcttctatcacagggagaagtgaaatgacaacctcactagatacagttgagacctttggtaccacatcctactatgatgacgtgggcctgctctgtgaaaaagctgataccagagcactgatggcccagtttgtgcccccgctgtactccctggtgttcactgtgggcctcttgggcaatgtggtggtggtgatgatcctcataaaatacaggaggctccgaattatgaccaacatctacctgctcaacctggccatttcggacctgctcttcctcgtcacccttccattctggatccactatgtcagggggcataactgggtttttggccatggcatgtgtaagctcctctcagggttttatcacacaggcttgtacagcgagatctttttcataatcctgctgacaatcgacaggtacctggccattgtccatgctgtgtttgcccttcgagcccggactgtcacttttggtgtcatcaccagcatcgtcacctggggcctggcagtgctagcagctcttcctgaatttatcttctatgagactgaagagttgtttgaagagactctttgcagtgctctttacccagaggatacagtatatagctggaggcatttccacactctgagaatgaccatcttctgtctcgttctccctctgctcgttatggccatctgctacacaggaatcatcaaaacgctgctgaggtgccccagtaaaaaaaagtacaaggccatccggctcatttttgtcatcatggcggtgtttttcattttctggacaccctacaatgtggctatccttctctcttcctatcaatccatcttatttggaaatgactgtgagcggagcaagcatctggacctggtcatgctggtgacagaggtgatcgcctactcccactgctgcatgaacccggtgatctacgcctttgttggagagaggttccggaagtacctgcgccacttcttccacaggcacttgctcatgcacctgggcagatacatcccattccttcctagtgagaagctggaaagaaccagctctgtctctccatccacagcagagccggaactctctattgtgttttaggtcagatgcagaaaattgcctaaagaggaaggaccaaggagatgaagcaaacacattaagccttccacactcacctctaaaacagtccttcaaacttccagtgcaacactgaagctcttgaagacactgaaatatacacacagcagtagcagtagatgcatgtaccctaaggtcattaccacaggccaggggctgggcagcgtactcatcatcaaccctaaaaagcagagctttgcttctctctctaaaatgagttacctacattttaatgcacctgaatgttagatagttactatatgccgctacaaaaaggtaaaactttttatattttatacattaacttcagccagctattgatataaataaaacattttcacacaatacaataagttaactattttattttctaatgtgcctagttctttccctgcttaatgaaaagctt

SEQ ID NO: 101 - DNA, 1915 bp, Homo sapiens
ttagagccgggtaggggagcgcagcggccagatacctcagcgctacctggcggaactggatttctctcccgcctgccggcctgcctgccacagccggactccgccactccggtagcctcatggctgcaacctgtgagattagcaacatttttagcaactacttcagtgcgatgtacagctcggaggactccaccctggcctctgttccccctgctgccacctttggggccgatgacttggtactgaccctgagcaacccccagatgtcattggagggtacagagaaggccagctggttgggggaacagccccagttctggtcgaagacgcaggttctggactggatcagctaccaagtggagaagaacaagtacgacgcaagcgccattgacttctcacgatgtgacatggatggcgccaccctctgcaattgtgcccttgaggagctgcgtctggtctttgggcctctgggggaccaactccatgcccagctgcgagacctcacttccagctcttctgatgagctcagttggatcattgagctgctggagaaggatggcatggccttccaggaggccctagacccagggccctttgaccagggcagcccctttgcccaggagctgctggacgacggtcagcaagccagcccctaccaccccggcagctgtggcgcaggagccccctcccctggcagctctgacgtctccaccgcagggactggtgcttctcggagctcccactcctcagactccggtggaagtgacgtggacctggatcccactgatggcaagctcttccccagcgatggttttcgtgactgcaagaagggggatcccaagcacgggaagcggaaacgaggccggccccgaaagctgagcaaagagtactgggactgtctcgagggcaagaagagcaagcacgcgcccagaggcacccacctgtgggagttcatccgggacatcctcatccacccggagctcaacgagggcctcatgaagtgggagaatcggcatgaaggcgtcttcaagttcctgcgctccgaggctgtggcccaactatggggccaaaagaaaaagaacagcaacatgacctacgagaagctgagccgggccatgaggtactactacaaacgggagatcctggaacgggtggatggccggcgactcgtctacaagtttggcaaaaactcaagcggctggaaggaggaagaggttctccagagtcggaactgagggttggaactatacccgggaccaaactcacggaccactcgaggcctgcaaaccttcctgggaggacaggcaggccagatggcccctccactggggaatgctcccagctgtgctgtggagagaagctgatgttttggtgtattgtcagccatcgtcctgggactcggagactatggcctcgcctccccaccctcctcttggaattacaagccctggggtttgaagctgactttatagctgcaagtgtatctccttttatctggtgcctcctcaaacccagtctcagacactaaatgcagacaacaccttcctcctgcagacacctggactgagccaaggaggcctggggaggccctaggggagcaccgtgatggagaggacagagcaggggctccagcaccttctttctggactggcgttcacctccctgctcagtgcttgggctccacgggcaggggtcagagcactccctaatttatgtgctatataaatatgtcagatgtacatagagatctattttttctaaaacattcccctccccactcctctcccacagagtgctggactgttccaggccctccagtgggctgatgctgggacccttaggatggggctcccagctcctttctcctgtgaatggaggcagagacctccaataaagtgccttctgggctttttct

SEQ ID NO: 102 - DNA, 1130 bp, Homo sapiens
tgagagtccggctcaggctccggctgcggctccagcccgcgatgccccattccgtgaccctgcgcgggccttcgccctggggcttccgcctggtgggccgggacttcagcgcgcccctcaccatctcacgggtccatgctggcagcaaggcctcattggctgccctgtgcccaggagacctgatccaggccatcaatggtgagagcacagagctcatgacacacctggaggcacagaaccgcatcaagggctgccacgatcacctcacactgtctgtgagcaggcctgagggcaggagctggcccagtgcccctgatgacagcaaggctcaggcacacaggatccacatcgatcctgagatccaggacggcagcccaacaaccagcaggcggccctcaggcaccgggactgggccagaagatggcagaccaagcctgggatctccatatggaaaacccccttgctttccagtccctcacaatggcagcagcgaggccaccctgccagcccagatgagcaccctgcatgtgtctccaccccccagcgctgacccagcagaggcctcccgcggagccgggagcagagtcgacctgggctccgaggtgtacaggatgctgcgggagccggccgagcccgtggccgcggagcccaagcagtcaggctccttccgctacttgcagggcatgctagaggccggcgagggcggggattggcccgggcctggcggcccccggaacctcaagcccacggccagcaagctgggcgctccgctgagcggcctgcaggggctgcccgagtgcacgcgctgctgccacggaatcgtgggcaccatcgtcaaggaacgggacaagctctaccatcccgagtgcttcatgtgcagtgactgcggcctgaacctcaagcagcgtggttacttctttctggacgagcggctctactgtgagagccacgccaaggcgcgcgtgaagccgcccgagggctacgacgtggtggcggtgtaccccaatgccaaggtggaactcgtctgagctgggaccctgctcccacccctgcttcttaaggtccctgctcggccggtgtaaatatgtttcaccctgtccctctaataaagctcctctgctcaaaaaaaa

SEQ ID NO: 103 - DNA, 8670 bp, Homo sapiens
gagctcaagagttcaagacccgtctgggcaagatggcaaaactccatcaccacaaaagatgcaaaaagatgcgcacagtggcgcacacctatagccccagttactgaggaggttaatgtgggaggatcacatgaggctgcagtgagctgtgatggtgccactgtactccagccttggcgacagtgagtctatgtctcaaataagtaagtaaacaaaaattaaaaagaatccagtccacagggcatttgaaggcaagaggaaaagatgccagaatcagagatggggagaagatgggcttcacgcacctgctgaggttgagaaatgagacagataggctgagtgtggggtggagagaggatgggcagagagactgaggctggtctgaatggaaatgaaatgttagggctctcagggttatcggggaataattggagcttctaggaaaggtttaacgttgtgaccacctgtgtgcgtcatgcctccccaccccttactaattgtgtgaatttggcagactttgagtctcagtgttctcctctgtgaagtggggtcatcttattccaactcctgggattgttgtgtgaattaaatggggtaatgtacggagagcacctgacgcacagcgagtgcttcaaaatttcagtctgcaccccccagcaaaggatatgcacacgcccattgtgagtgacaaatccaggatgacctgaacccaatgtgataacgtgggtcctcgcatgctggtcatgctgccgggagacacttatggatccaattagtacaacaggggaaataaattatttaatgcattttgctaagacagaatacctcagaacttattttgtggggtggggcataataaagggggtccttctgctgaaaacgtttaagctcaggttcgtggcaccactcaaccaaggtcgacagtcacacagtaagccagaggcaatgtcaggacttaaactaaacctgtggcccccacaatgaggccatttctctttcccctgaacggcctggggaaagggggtgggtgggcagaacttggcagtggccaatccctcacttctgtcccctggttttctcctgcccttatctctaggcttgcattgattgattgattgagacagggtcttgctctgtcgtccaggctggagtgcagtggcacgatcatggctcactgcagcctcaaactcctaggctcaagtggtctttccgcctcctatctcccgagtacccatatccctaggcttttaaaatggcttccaggtatctggctgccgtctcagacatccacctgggcttctgggcagggactgtccgggaaacctcatctatgtgaagcaggtgtgggtgtaggaaggccgcttggaaatgaatcagcactgtctcctgtttgagtcgtaagcagggcgccagagggtctggcggacaagaaagggaggatgacaggaggccggcactgcaatgacacgccttagccaccagagggcacgaagcagctgggcaaaatcccgcggggcccctggtggaaaatttctggcacctggagcccggagatggggtggacggaatgtgaggacccagcttcctgaggctgggccggggcagagtcactgctttggatgtccgcagggcctgcttgtgtcttgactactctgcctttgtagacagctggagaatgtgagagtgggattgggatcggactctagggccattccgtacaactctcctgccctgccgtgggggagggagttgcccaaggttacgcagcaagttagtggcaaatgaatacgattatcaccagtctcaggtatatggccatttgatgggcgcagtcgcagcctcagttcctgagacagagacacctgattaaggacaggccttcaggagctgaccctagtgacccgcggctctgctgctgtctctgtttttctccctggcttttccatctgactgactctttgtcttcttcgtctgcctgcctgtctccgtctctgcccgctggggggtttgctcaactccctcactgggtcctgggagccgcagtttcctgctgtcactcctcagggatttgtagctctctgaagctcttttccgacccgttgtctcggttccactcttgggatccagaggagaggtgattatttcgtagcatagtcagtggtgtgatttcacggggtgagaaggactcccttgctcctaagcactcctccagtgacccctgttgccatgtggtagccgtaagcactggttggcacctggtgtgggcgagacccttacctcatgcagaaatgagtaagactggtgagctcactatgtggggtgaggctgagagaaaacaagtacacaggtgattcagtcaaaatcagaattctctaagtacacacgaaaagggcaaaaggggcgctttgtacaggacagaacaggtagacactgaatccggttgggccctgggaaggctccctgcagtggcctttgaagggggggttggatttcagcaggatagagggcatgggcatgtgtgggcacgttctgaacagaggggtcagcgcaagccgagggtcttggccacactagttgcatgtgccggtgtgtttaagggacacgcagcagcaggccgagtctggagcgcctcactgccaggctttttaaaaatttttaattttaatttaattttattttatttttactttaagttctggcatacatgtgcagaatgtggtttgttacataggtatacatgtgccatggtggtttgctgcacctatcaacccatcatctaggttttaagccccgcatgcatcaggtattagtcctaatgctctccctccccttgcccccatccttctccccgcaactgcccacaggccctggtatgtggtgttcccttccctgtgtccatatgttctcattgttcaactcccacttatgagtgagaacataccgcctggctttaagggacagccatggggatgcactgcagtttctgagcagggaaggccctgtggaggcccttagttaaaaggaaagaatggctgtgaaaatcgatgcattgcgctcccttgtccctcaccctcagtgtgaagggtttttattccgagttctacttgaagtaggcctcgatgggaagacaagtagcatgaggggttcaagtactgaggggagcaagggacactcggtggctgtgccaaggtgtagaagaggacactgggggccccaagacctgacttcatgtacactgctcaggctggcccccaagtcacacggtgaccgctaggaagggaccagcctgttctcagtctgatcctacagccatgtcattatccaaagctcctcctggcagggcctgtttggggtctctgtgccagtgctttccctgccaggctgggctggggcttccacctactgctctgggactgctgctgccctggccctgggggaggagggtgtgccgctgagtcactgcctgggcatctgggcctggaacctcgggtgagtcacttagggctgaggtagaggggctgggggaggggaagaagctactcgacagctggagcagggaggggagctggggccacaggaagggcggtgccctgatgcccagacgggccgggatagacaaagggccaaggaggaaggggccctgggagggggcagccctcccttgggctggggtctgaatggcacagtgtttgcctttctccgggtctggggaggacatgtgtgtggggggcagtgagagagggctgtggctgagggctgtgcttcaggcctggattctggcttgggaagctgtccagctggtgttttcagccttgggtagggatgtacccctacccacccacccagccctcaagctggagaagaggaggccaaagttttcctgttcagcctttaactactcgggacttccttatgctccccacagactgtggcccagcccaactgcggctgtgtgtagagcaaccccatttctcactgcttccccatccttccagacaccttcctacacagagggaccttcccaggtatttctaagcacacttagttacctcattacctcattaagaggtattctggtgctggccattaaaagtcactccacttcatccatgccctgaagtcagtcctgtccttctcctcctgatgtcccccagctgcctcctctggcccccagcttcctaaggtggccccaggttgcttctctctcacacacacgggcgcatgtatgtacacgagcactggaccatgaagtctcagcgtgtgctcacagcctctcacacaggagtgggctgtgactcacaggcatgtcatgagaatgaggcctggcaccagtctccaggccccagagcaggggttgcctcccctcaccccggtccaggatgcccagtccccacgacacctcccacttcccactgtggcctgggtgggctcaggggctgcccttgacctggcctagagccctcccccagctggtggtggagctggcactctctgggagggagggggctgggagggaatgagtgggaatggcaagaggccagggtttggtgggatcaggttgaggcaggtttggtttccttaaaatgccaagttgggggccagtggggcccacatataaatcctcaccctgggagcctggctgccttgctctccttcctgggtctgtctctgccacctggtctggtgagtacctctgtcctgctgagggcagggtggggaggatccccgtgggtctctgtctttgtctccacagttctctcattccagcttccctggtgggatcaacctgggcctctctgggccttcccccttggaagaactctctgtgaagtgctgaagtgttgactgaagggttttttttttttttttttttttttgagatggagtctcgctctgtcgcccaggctggagtacagtggtgtgatctcagctcactgcaaactccccctcccaggttcacgccatttccctgcctcagcctcccgagtagctgggactgcaggcgcccaccaccatgcccggctaatttttttgtatttttagtagagatggggtttcaccatgttagccaggatggtctcgatctcctgatctcgtgatccacccatctcggcctcccaaagtgctgggattacaggagtaagccaccgcgcccggccgactgaagggtttttctccaggttcctctgtgaggtctcagtgcaggggttgctctgaggccctcccctggatatctcagtctaggggcccttctttgggggtctaggcctaggagcaggaggtgtgcatgtgggcgttgctgcaaaaagaatcctgagatttttttttttttttttttttttgcaaagtcctggattctagcaggactaaggtgcaagaggcaggggtctcaagactctgcctgggtcatggccccaagcagcaaagctctgccccctgcctcggtgaaggcagggctggcatgatgggcccagggcatgccctgcctctggcatagctcctctggcctcaccctgaaacctgcctaacctttccaggctggtctgagtattctcagaggccttgccgctgaggtctgtcccatcctgatcccaaggcaatgaacatttcatatctttaattctaattccaacaggatccttcctggtggagagaatgttaagttgcccccaccctatccatgcccctgtctgcctagaggctcaggggccttcagggtgaggggagacacattccccaccctctgggagctcctagtctgagagaggaaacactcctgcccaagggagcttccagttagatggcagagagagatgcctctggcttcaggagtcccgagtctaaggagggaaacgactccttcagggagcttcctgctcctaggctgtagccatggctcctgccagactgcacaggagcccccatctgccagccggtgcatgtggccctgctccccagagcctgcgcagatgccatcaaaatgggactctggtcaccctgtcatttcccttctggcagacactaaaatggggagccctgccctcaggggggtgtcccaagtgccatcagaggaggcttggtgactcccagacacaagggaagctttagcgtctgccctcagggtgagatggaggtatccctccggcctcagggaaccacagtctgaggggagatgcagcccctgccttcccattcagagaggggttttgtgaggtggcttgggggcatagggcagaagtggatcctacaggctgagctaaggccccaagagcctcagcagtgtacccatcacctggcacctctgcagccacagatccatgatgtgcagttctctggagcaggcgctggctgtgctggtcactaccttccacaagtactcctgccaagagggcgacaagttcaagctgagtaagggggaaatgaaggaacttctgcacaaggagctgcccagctttgtgggggtgagtggcacaggcctgtgggggaggtcctggtgtgagtgtgggggtgcaggttaaatctctcccccagttccgggtgcctgtcgatgcaggtgccagggtggggcccagcccctccccactttagcttcatggctccactggagtggaaatgaggcccgagtgggagtgcttaattaatggctgtttcctgcaacattccagagaaccatgtgctgtgagggccttccgagtccatctgtttaatcctgtcattggaacttgagaaaccagagcccagaagggaaaagtgattgtcccaagatcacacagcactggcacgttctctctctctcttttcttttctttttttttttttgagatggagtttccctcttgttgcccaggctggagtgcaatggcacgatctcggctcactgcaacctctgcctccaggggtcaagcaattctcctgtctcagcctcctgagtagctgggactacaggcgcatcccactacgcccagctaatttttgtatttttagtagagacagggtttcaccatattggccaggctggtctcgaactcctgacctcgtgatctacctgcctcggcttcccaaagtgatttttgtatttttagtagagacggggtttcatcatattggtcaggctggtctcgaactcctgacctcaggtgatctgccctcctcggcctctgaaagtgctgggcttacaggcgtgagcaccgtgcccggactccttttttttttttttttttttgtggtggggggacaagatctcactctgtcacccaggctggatcatagctcactgtaatctcgaactcctgggctcaagcaatcctcccaagtagttggaactacaggagtattgtcaccatgcctggccaatttttattttttgtagagatggagtcttgctatgttgtccaggctgggcttgaactcctgggttcaagcaatcctcccacctcggcctcccaaagtattggaattacagatgtgagccactgtgcttgacctctttccatttttatatgccaaactaagaaagtatgttagggatagaaaagccctgctcagatatatagtctgggacattttgtggagaaatgcatcgaccttcaatttgtccctcaccctccctatactgactcattggtgattcccaaagttaggtgtcaggctttgaacacatgaggcaggtccttctttccttggtttaattttgtttttgtggctggttaaatttttctaattatttcggctagtattaaaaaagtgtttttcagctgggtgcagtggcctatgcctgtaatccccacagtgtgggaggctaaggcaggaggatctcttaagcccaggagttcgaccagcctgggcaacatagcaagactccatctctacaaaaataaaaataaaaattggccaggcatggtggcatacgcttgtagtcccagctacttgggaggctaaaggtgggaggattgctggagcccaggaggttgaggctgcagtgagttgtgattgtgccactgcactccaacctgggctaacagagcaagaccttgtcttaaaaaataaaaagtgttcttttctgaatctacctggctggtgttggggagcagcaacttcggtttcctcatcagcagaatggggtgatgatacctacctcgctgggctcctgtgggattcgagctgatgcatgctcagaggagcatccagtgtcctccctgtgtccaggaggagggcacactggagatgctcaccaatgagtatctgtctctctccttactcactgggccctcttggtagctcccagagcctcctgcccaccttatacccagctgcccagtggggagggagagctggaaccaacctgaatgtgtgagggtctgggtgtttggtggagctggggttggggctggcttggtgatgagtgtatttcctgtcactttcaggagaaagtggatgaggaggggctgaagaagctgatgggcagcctggatgagaacagtgaccagcaggtggacttccaggagtatgctgttttcctggcactcatcactgtcatgtgcaatgacttcttccagggctgcccagaccgaccctgaagcagaactcttgacttcctgccatggatctcttgggcccaggactgttgatgcctttgagttttgtattcaataaactttttttgtctgttga

SEQ ID NO: 104 - DNA, 2720 bp, Homo sapiens
cgcccccccggtgtccgccctgctgtcggcgctggggatgtcgacgtacaagcgggccacgctggacgaggaggacctggtggactcgctctccgagggcgacgcataccccaacggcctgcaggtgaacttccacagcccccggagtggccagaggtgctgggctgcacggacccaggtggagaagcggctggtggtgttggtggtacttctggcggcaggactggtggcctgcttggcagcactgggcatccagtaccagacaagatccccctctgtgtgcctgagcgaagcttgtgtctcagtgaccagctccatcttgagctccatggaccccacagtggacccctgccatgacttcttcagctacgcctgtgggggctggatcaaggccaacccagtccctgatggccactcacgctgggggaccttcagcaacctctgggaacacaaccaagcaatcatcaagcacctcctcgaaaactccacggccagcgtgagcgaggcagagagaaaggcgcaagtatactaccgtgcgtgcatgaacgagaccaggatcgaggagctcagggccaaacctctaatggagttgattgagaggctcgggggctggaacatcacaggtccctgggccaaggacaacttccaggacaccctgcaggtggtcaccgcccactaccgcacctcacccttcttctctgtctatgtcagtgccgattccaagaactccaacagcaacgtgatccaggtggaccagtctggcctgggcttgccctcgagagactattacctgaacaaaactgaaaacgagaaggtgctgaccggatatctgaactacatggtccagctggggaagctgctgggcggcggggacgaggaggccatccggccccagatgcagcagatcttggactttgagacggcactggccaacatcaccatcccacaggagaagcgccgtgatgaggagctcatctaccacaaagtgacggcagccgagctgcagaccttggcacccgccatcaactggttgccttttctcaacaccatcttctaccccgtggagatcaatgaatccgagcctattgtggtctatgacaaggaataccttgagcagatctccactctcatcaacaccaccgacagatgcctgctcaacaactacatgatctggaacctggtgcggaaaacaagctccttccttgaccagcgctttcaggacgccgatgagaagttcatggaagtcatgtacgggaccaagaagacctgtcttcctcgctggaagttttgcgtgagtgacacagaaaacaacctgggctttgcgttgggccccatgtttgtcaaagcaaccttcgccgaggacagcaagagcatagccaccgagatcatcctggagattaagaaggcatttgaggaaagcctgagcaccctgaagtggatggatgaggaaacccgaaaatcagccaaggaaaaggccgatgccatctacaacatgataggataccccaacttcatcatggatcccaaggagctggacaaagtgtttaatgactacactgcagttccagacctctactttgaaaatgccatgcggtttttcaacttctcatggagggtcactgccgatcagctcaggaaagcccccaacagagatcagtggagcatgaccccgcccatggtgaacgcctactactcgcccaccaagaatgagattgtgtttccggccgggatcctgcaggcaccattctacacacgctcctcacccaaggccttaaactttggtggcataggtgtcgtcgtgggccatgagctgactcatgcttttgatgatcaaggacgggagtatgacaaggacgggaacctccggccatggtggaagaactcatccgtggaggccttcaagcgtcagaccgagtgcatggtagagcagtacagcaactacagcgtgaacggggagccggtgaacgggcggcacaccctgggggagaacatcgccgacaacgggggtctcaaggcggcctatcgggcttaccagaactgggtgaagaagaacggggctgagcactcgctccccaccctgggcctcaccaataaccagctcttcttcctgggctttgcacaggtctggtgctccgtccgcacacctgagagctcccacgaaggcctcatcaccgatccccacagcccctctcgcttccgggtcatcggctccctctccaattccaaggagttctcagaacacttccgctgcccacctggctcacccatgaacccgcctcacaagtgcgaagtctggtaaggacgaagcggagagagccaagacggaggaggggaaggggctgaggacgagacccccatccagcctccagggcattgctcagcccgcttggccacccggggccctgcttcctcacactggcgggttttcagccggaaccgagcccatggtgttggctctcaacgtgacccgcagtctgatcccctgtgaagagccggacatcccaggcacacgtgtgcgccaccttcagcaggcattcgggtgctgggctggtggctcatcaggcctgggccccacactgacaagcgccagatacgccacaaataccactgtgtcaaatgctttcaagatatatttttggggaaactattttttaaacactgtggaatacactggaaatcttcagggaaaaacacatttaaacacttttttttttaagccc

SEQ ID NO: 105 - DNA, 4139 bp, Homo sapiens
ccgctccacctctcaagcagccagcgcctgcctgaatctgttctgccccctccccacccatttcaccaccaccatgacaccgggcacccagtctcctttcttcctgctgctgctcctcacagtgcttacagttgttacaggttctggtcatgcaagctctaccccaggtggagaaaaggagacttcggctacccagagaagttcagtgcccagctctactgagaagaatgctgtgagtatgaccagcagcgtactctccagccacagccccggttcaggctcctccaccactcagggacaggatgtcactctggccccggccacggaaccagcttcaggttcagctgccacctggggacaggatgtcacctcggtcccagtcaccaggccagccctgggctccaccaccccgccagcccacgatgtcacctcagccccggacaacaagccagccccgggctccaccgcccccccagcccacggtgtcacctcggccccggacaccaggccggccccgggctccaccgcccccccagcccacggtgtcacctcggccccggacaccaggccggccccgggctccaccgcccccccagcccacggtgtcacctcggccccggacaccaggccggccccgggctccaccgcccccccagcccacggtgtcacctcggccccggacaccaggccggccccgggctccaccgcccccccagcccacggtgtcacctcggccccggacaccaggccggccccgggctccaccgcccccccagcccacggtgtcacctcggccccggacaccaggccggccccgggctccaccgcccccccagcccacggtgtcacctcggccccggacaccaggccggccccgggctccaccgcccccccagcccacggtgtcacctcggccccggacaccaggccggccccgggctccaccgcccccccagcccacggtgtcacctcggccccggacaccaggccggccccgggctccaccgcccccccagcccacggtgtcacctcggccccggacaccaggccggccccgggctccaccgcccccccagcccacggtgtcacctcggccccggacaccaggccggccccgggctccaccgcccccccagcccacggtgtcacctcggccccggacaccaggccggccccgggctccaccgcccccccagcccacggtgtcacctcggccccggacaccaggccggccccgggctccaccgcccccccagcccacggtgtcacctcggccccggacaccaggccggccccgggctccaccgcccccccagcccacggtgtcacctcggccccggacaccaggccggccccgggctccaccgcccccccagcccacggtgtcacctcggccccggacaccaggccggccccgggctccaccgcccccccagcccacggtgtcacctcggccccggacaccaggccggccccgggctccaccgcccccccagcccacggtgtcacctcggccccggacaccaggccggccccgggctccaccgcccccccagcccacggtgtcacctcggccccggacaccaggccggccccgggctccaccgcccccccagcccacggtgtcacctcggccccggacaccaggccggccccgggctccaccgcccccccagcccacggtgtcacctcggccccggacaccaggccggccccgggctccaccgcccccccagcccacggtgtcacctcggccccggacaccaggccggccccgggctccaccgcccccccagcccacggtgtcacctcggccccggacaccaggccggccccgggctccaccgcccccccagcccacggtgtcacctcggccccggacaccaggccggccccgggctccaccgcccccccagcccacggtgtcacctcggccccggacaccaggccggccccgggctccaccgcccccccagcccacggtgtcacctcggccccggacaccaggccggccccgggctccaccgcccccccagcccacggtgtcacctcggccccggacaccaggccggccccgggctccaccgcccccccagcccacggtgtcacctcggccccggacaccaggccggccccgggctccaccgcccccccagcccacggtgtcacctcggccccggacaccaggccggccccgggctccaccgcccccccagcccacggtgtcacctcggccccggacaccaggccggccccgggctccaccgcccccccagcccacggtgtcacctcggccccggacaccaggccggccccgggctccaccgcccccccagcccacggtgtcacctcggccccggacaccaggccggccccgggctccaccgcccccccagcccacggtgtcacctcggccccggacaccaggccggccccgggctccaccgcccccccagcccacggtgtcacctcggccccggacaccaggccggccccgggctccaccgcccccccagcccacggtgtcacctcggccccggacaccaggccggccccgggctccaccgcccccccagcccacggtgtcacctcggccccggacaccaggccggccccgggctccaccgcccccccagcccacggtgtcacctcggccccggacaccaggccggccccgggctccaccgcccccccagcccacggtgtcacctcggccccggacaccaggccggccccgggctccaccgcccccccagcccacggtgtcacctcggccccggacaccaggccggccccgggctccaccgcccccccagcccacggtgtcacctcggccccggacaccaggccggccccgggctccaccgcccccccagcccatggtgtcacctcggccccggacaacaggcccgccttgggctccaccgcccctccagtccacaatgtcacctcggcctcaggctctgcatcaggctcagcttctactctggtgcacaacggcacctctgccagggctaccacaaccccagccagcaagagcactccattctcaattcccagccaccactctgatactcctaccacccttgccagccatagcaccaagactgatgccagtagcactcaccatagctcggtacctcctctcacctcctccaatcacagcacttctccccagttgtctactggggtctctttctttttcctgtcttttcacatttcaaacctccagtttaattcctctctggaagatcccagcaccgactactaccaagagctgcagagagacatttctgaaatgtttttgcagatttataaacaagggggttttctgggcctctccaatattaagttcaggccaggatctgtggtggtacaattgactctggccttccgagaaggtaccatcaatgtccacgacgtggagacacagttcaatcagtataaaacggaagcagcctctcgatataacctgacgatctcagacgtcagcgtgagtgatgtgccatttcctttctctgcccagtctggggctggggtgccaggctggggcatcgcgctgctggtgctggtctgtgttctggttgcgctggccattgtctatctcattgccttggctgtctgtcagtgccgccgaaagaactacgggcagctggacatctttccagcccgggatacctaccatcctatgagcgagtaccccacctaccacacccatgggcgctatgtgccccctagcagtaccgatcgtagcccctatgagaaggtttctgcaggtaacggtggcagcagcctctcttacacaaacccagcagtggcagccgcttctgccaacttgtagggcacgtcgccgctgagctgagtggccagccagtgccattccactccactcaggttcttcaggccagagcccctgcaccctgtttgggctggtgagctgggagttcaggtgggctgctcacagcctccttcagaggccccaccaatttctcggacacttctcagtgtgtggaagctcatgtgggcccctgaggctcatgcctgggaagtgttgtgggggctcccaggaggactggcccagagagccctgagatagcggggatcctgaactggactgaataaaacgtggtctcccactg

SEQ ID NO: 106 - DNA, 1955 bp, Homo sapiens
gaattcaccaagcgttggattgttcacccactaatagggaacgtgagctgggtttagaccgtcgtgagacaggttagttttaccctactgatgatgtgttgttgccatggtaatcctgctcagtacgagaggaaccgcaggttcagacatttggtgtatgtgcttggctgaggagccaatggggcgaacgtaccatctgtgggattatgactgaacgcctctaagtcagaatcccgcccaggcgaacgatacggcagcgccgcggagcctcggttggcctcggatagccggtcccccgcctgtccccgccggcgggccgcccccccctccagcgccccgcgcgcgcgggagggcgcgtgccccgccgcgcgccgggaccggggtccggtgcggagtgcccttcgtcctgggaaacggggcgcggccggaaaggcggccgccccctcgcccgtcacgcaccgcacgttcgtggggaacctggcgctaaaccattcgtagacgacctgcttctgggtcggggtttcgtacgtagcagagcagctccctcgctgcgatctattgaaagtcagccctcgacacaagggtttgtccgcgcgcgcggcggcgtgcgtgcggggggcccggcggggcgtgcgcgtccggcgccgtccgtccttccgttcgtcttcctccctcccggcctctccgccgaccgcgggcgtggtgggggggtgggggggggacgcgcgaccccggtcggcgcgccccgcttcttcggttcccgcctcctccccgttcaccgcggggcggctcgtccgctccgggccgggacggggtccggggagcgtggtttgggagccgcggaggcggccgcgccgagccgggcccgtgcgcggtccccgtcccgggggttggccgcgcgggccccggtggggccacccggggtcccggccctcgcgcgtccttcctctcgctcctccgcacgggtcgaccagcagaccgcgggtggtgggcggcgggcggcgaggccgcacgggcgtccccgcacccggccgacctccgctcgtgacctctcctcggtcgggctccggggtcgaccgcctgccccgcgggcgtgagactcagccgctgtctcgccgtgtcccgggtcgaccggcgggcttctccaccgagcggcgtgtaggagtgcccgtcgggacgaaccgcaaccggagcgtccccgtctcggtcggcacctccggggtcgaccagctgccgcccgcgagctccggacttagccggcgcctgcacgtgtcccgggtcgaccagcaggcggccgcgacgtgcggcgcaccgacgagagggcgtgcattcccgttcgcgcgcccggaccctccaccggcctgggcccgacggtggagctgggaccacgcggaactccctctcctacatttttttcagccccaccgcgagtttgcgtccgcgggattttaagagggagtcactgctgccgtcagccagtaatgcttcctccttttttgcttttaggttttgctcttgcctttttttttttttttttctttctttctttctttctttctttctttctttctttctttctttctttctcgctctcgcctctcgctctctccctcgctcgttttctttctctttctctttctctctctctctctctctctctctctctgtctctcgctctcgccctctctctctctctcttctctctgtctctctctgtctctctctctctctctctctctctctctctctctctctctctctctctctccctccccctccctccctctctccccttccttggtgccttctcggctcttgacacttagccgctgtctcgccgtgtcccgggtcgaccggcgggccttctccaccgagcggcgtgtaagagtgcccgtcgggacgagccggacccgccgcgtccccgtctcggtcggcactccggggtcgaccagctg

SEQ ID NO: 107 - DNA, 512 bp, Homo sapiens
  misc_feature (1)...(512): n=a,t,g or c
ggcacgaggattatattttgcatctccctgcaagtctgttttatgttatttatagcttcctattcgtgtagacaccagcagtaaactggggaatatttgtggcaggaatttctaagaacaacctttagcatcatctcaggccctgatccatttccttttccacaaaattgtttgagattatatcgtatgtgttacagaaagaatgtttttctgtatgctcgaaactgtatactaaagtaaaataataaagttaaccagaattatccatggggaacaattccaattaaaataaaatgccagtatctggtaaaacctggtagtaatgctttttgtggtgatatccaggtaatgattagatgcagtaaacccgggtagtagggaagaagagagatgtggggacaagcagcccgaataccttgctggcatagcagctgcctacctgcacccggagacctgagcagatattactagggtatttatttgacagccagcttagcagtcangaaggacan

SEQ ID NO: 108 - DNA, 596 bp, Homo sapiens
  misc_feature (1)...(596): n=a,t,g or c
ctctctggaagggacattccatctccatggtgcactctgaggggcactgtcaactagagattggccccatccaggtgggaggaacccctttggatggtgagtatccaatctgctgtgcatttgacaggatctctgaatggctaggtaatggatcccaagcaggctcacaaatttaaatgagggctttgtgtgcagaaagaggaataagtacagattattttcctaccactagatttttggggagagtcaccatggaatgttgacaattacttaaaatattttaagctcccttgctgaattcctgtcctgtccctgaggaatcagatggtcatacagccatagnacccacccgaaatttccctaggagttggagtaatgctagaattgaagaccttctgagtaaagggcttctctgccttctcagaggcaggagaatttgcactggttgtgttaaatgtataaaaagctatatgttcaccagtttactcatttccaatgtgtagatgaataaaatgtagtgtacaaattatttgaaaatcccagaaggaaggtacttttcaaatacagtattttttttacaataacttacgattttt

SEQ ID NO: 109 - DNA, 1023 bp, Homo sapiens
tcccagacgctgcccatggaggcgtccagcgagccgccgctggatgctaagtccgatgtcaccaaccagcttgtagattttcagtggaaactgggtatggctgtgagctcagacacttgcagatctcttaagtatccttacgttgcactgatgctaaaagtggcacatcattcaggccaacgtaaagaccaagtgctttgaaatgacgattccacagtttcagaatttctacagacagttcaaggaaattgctgcagttattgaaacggtgtgaagacgggttctttggttgataaattgcgatcattctaaagtcatggacttcactttcgggaacaaaacctaataaggatggaacaattattgaatgacaaatgccctttggttttcccttgttttaaaataataagaatctgggccaaccgggtgaatctgatggaaacaaggtctttagataagcggcccgaagcttatccccttaggtgcgggtaaattttaccttgggacttggccgcggtgttacaacgcgggtggcctgtggaaactctgtgcggttcgcccacattaatcgccccttgagggcgattcccgccgttgtccacgcggggcgatatgtcgcgacaaggcccggaccgtgttgccgtgtccacagatggggccccccgaagtcgcgcttggagcgtccccctttgggcgcgtttgacgcgcgtggggtttgtgggtatgcgcgggagccggggaaccttgtagtgcgctgtcccgggggtttagggtgtcgccgcctttcgcggtttccggggtctcccgaagtgtattaggggcccctggcgcccagagagtgtttgccgccccacatatgtttgggggcgctgtgtgccccccgagggagctcttcgggagcggcggtatatgtcctttgaaacaccgctctcttttttgccgcgccgcaggagtgtataggaggagttgtgcgcgtggcttacgtcaccaaagtggttgtttctgagagccgtccggcctagg

SEQ ID NO: 110 - DNA, 422 bp, Homo sapiens
gggagcgtggccagccgcttgccgatcgccatcagggacttgatgaattctctctcaggagccagtcgaacaggctcatcctcattctccactttagggttgctggctgttcgtttcaggttgctgctgagacttatgctggcagtggcatctgacttagagcgctggtgagtccttttggagggagacagccctgtgtcaggggccgggctcaaggagggcagctccctcttcctgtgagctggctttactcatctgagaggatcagcttccgtagcttggtcccacgggagtgtcgttgagtggaaatgtgcatgtctgaagaataggccccaagcaacagggcacactggagggaaaagttaatgctctggcggcaacggtggactatgtagggcttaatggcatcacccacgtcctca

SEQ ID NO: 111 - DNA, 263 bp, Homo sapiens
aggatgtctaagctaatcccgtcacagaaaggaaacgcacaggcgcctaggcagaaacttggagactcaccgcagaggccacgtgaacccacggccacagagaggcaggacggcagagccatgatttcccaccgagcgattacgagaacctcttcccccaatagtagacacatctccaatacaaacacaggtttataataagtaataggaagtcaatataatatagattatccccagaaaaaaatcaacaatcttcaaacact

SEQ ID NO: 112 - DNA, 461 bp, Homo sapiens
aattttacataagggacttgagaagcatggattttggtagccacaggggtcctggaaccaatccctcacagacacagacggacactttacagtagatgaacacaaagatgaaaggaaaagtctgacctaggtctgcggggagaagtggaactccatttttgacaggtgatgccattttttgttttggacatcgtccctctgtagttctttccattcccagtcttgcactctgaaagatacactgaaggaaagtccacacagtggtcaaagtctttcacaagacaccacgtgaaggtctgcacagcacagtcacattgagaaaaagatctcatgcaccagaccccctgtttctgctttctaaaagatcatcttttgcacctgcaaaaaggctgcagtaaactgggccattccatactttgattcatgtattcaatgctacttatgagctctctgtgtattga

SEQ ID NO: 113 - DNA, 446 bp, Homo sapiens
ggcagcagggaggcctgggtgcgaacgatgttggcttggccttcacggtcctggagggaggtgaggctggccttggaagggtgccctggagaggtcttgggtgaaaacttgaccttgaagaaaccaatcacaaaagcggcgttgggtcagggctaggcttagaggtgaagcatcaacatggaaccatctcaggaagccgcatcgcctcttccgaggtcctcacttccaggagcctgtccttgcaagatgcaatcatcgttcctgctttttcattgtcattaaattctgtagaaacccattgtcattagctccaagtgtaaatttgggtcaaggagacagaataataatgggaatctcggagttcgacaccatagtgacgttcagcgtcctctgaattgtgctacatcagcgaacaagtcggcgcttgaattggattttgaggttat

SEQ ID NO: 114 - DNA, 6336 bp, Homo sapiens
cgccgctcaggccctggagcggacggttcctactgcggctgggcaccggctccgctcccgcgtctgcccgcgctccagctgcgcctggcccggccccggcccggctcggcgtggccccggcctccaagcgaaggcgccgctgccgctgggccgctcccagggccatgaggaagcggcggcagccactgcggcccgcgtcaaggacttctccagacaggttatgttacctgcagaggctgccctgaagctccctgtggcctggagactatgtacaagaggaatggtctgatggctagcgtgttggtcacctctgccactccacagggcagcagcagctcggactctctggagggccagagctgcgactatgccagcaagagctatgatgccgttgtcttcgatgtcttgaaagtgaccccagaggagtttgctagccagattacattaatggatatacctgtgtttaaagctatccagccggaggaactagccagctgtggatggagtaagaaggagaaacacagtcttgcccctaacgttgtggcctttacccggaggtttaaccaggtcagtttttgggttgtacgagaaattctaacagcacagactttaaaaataagggcagaaatcctcagccattttgtgaaaatagccaagaaacttctagaactcaacaaccttcattctctcatgtctgtggtatcagcattacaaagtgctcccatcttcaggctgacaaaaacctgggctcttttaaatcgaaaagacaagactacctttgagaaattggactacctgatgtcgaaagaagataattacaagcggacacgggaatatatccgaagcctgaagatggttccaagtattccctatctaggaatctatcttctggatttaatctacattgattctgcatatcctgcctcaggcagtatcatggaaaatgaacaaagatccaatcagatgaacaatattcttcgaataattgctgatttacaagtttcctgcagctatgatcacctcaccaccctgccccatgtgcagaagtacctgaagtccgtacgctacattgaagagctccagaagtttgtggaagacgacaactacaaactgtcgctcagaatcgaaccaggaagcagctctccaagactagtctcttccaaggaagatcttgcaggtccctctgctggctccggttctgcgaggttcagccggaggcccacctgtcctgacacatctgttgctggcagcctccccacacctccagtccccagacacaggaagagccacagcctaggcaacaatatgatgtgtcagttgagtgtagttgagagtaaaagtgcgacattcccatcggagaaagcaaggcacctactggacgacagtgtcctagagtcccgcagcccccgaaggggcctggctctgacctcctcctctgctgtcaccaatggactctccctaggcagtagtgagagctcagagtttagtgaagagatgtcttcagggctggaaagccccaccggcccgtgcatctgttctctggggaactccgcagctgtgcccaccatggaggggcctctgagaagaaaaaccctgctcaaggaagggcggaagcctgcgctgtcctcgtggaccaggtactgggtcatactctcaggatccaccctcctgtactacggagccaagtccttgcggggcacagacagaaaacactataaatccacacctggcaaaaaggtttccatcgtgggctggatggtgcagctgcccgatgaccccgagcacccagatatcttccagctgaacaaccctgacaaaggcaatgtttacaagtttcagactggttcccgatttcatgcaatactgtggcacaagcatttggatgatgcatgtaaaagcaacaggcctcaggtacctgcaaaccttatgtcatttgagtaagtctctgcaggacgtggcatgacttcagaggcttctgggaacccaggctgggcctggtggtgaagagcagtcctgggcacaggctgtgagccagggtgctgggaaactcacagctggactcaggggacacggcctgtggcctcaccatcccagagggcttcaccagtgtgggatccacctgtcagtccccagcgactctcatgacactcattctgcagcaccgcctcttggggcagtggtcagaccccacacgccctctctgggcccaccacctgcatctgcgactagagagcacccggcccacgttgggttctcagtgctttctactgcacagagtggacagcgctaactaacctgtgagaggggcccgagagaaggaacagctgtggaacaggctttttacaccccaagtgcatggggttgctcgcccacagggctgcctcagattttgtacaaccccgaagcgtcctctgcgtgtgcgtgctgtacgtgtgtgtgtgtgtgtgagcgagtgtgaactcttcaagaaacatgcattttggcacaagactcgtgacatcacacacttcattcgctttgaggccctgctttaaccttaagttatagccctgtccaccgaggaaggtcagggtgagagcctagattcctcctgtgtcaagggtccctcgcattcttttactgtaaacaaacaatgccttaaattgtgtcttgttttctgttcctatgggtgctattcatctggaaggcctgcttccaggcctctttgctgtcagcccttctgagacaggacctggcttcaggactgtggactgggctgctggcctgcttgcttcctcccttccccattcctagcagggcctgaggccctcctcttctcgcccttcccaccatgccagaatgggaagttgtgacgttgcagctccaaccgacgtgctcatagtgatcagctgtgcaggagccatgaggcaccaacctctccccgcagggcaaagcctgtgcccccatcatctcactcctttgcctgcactgccagggtggggcccaccaagattcctgatcatgacgggaagctgagtgaccctgaggccttaagcttccccagtcttggccccaaatgcagtcaccagcaagttttccattttccaagtccaagggcacaattgttgatgaccgtgtgacaatagagcgaagccccggggagtgaacggtccaacctctgcattcagttaggagctcttcacatgaatcacatccttatctgtcaccttgtgtcacattttaaagtgacttttattttgcacaaataatttttattcagaataataaatcactctttatcatagtatcttctcttccctcttcccctttagtttggatagcctaactctgagaagttaacccttaaacagttttctggaagagactgaatttctgggtccttgcagctgtgatggtttcagagctcagactgatcaggcatcaagctaccctcaagagtttctgggctggatgtttcagaacaacatctacaccagtaaagtgtaataggtcagtttcaaaacgaccaaaagacccaccactgtattttgaccaaataatgacaacttctttagaaatttgaatggcttggtgaggaaagtagttgtcaccagggcctcattttgtagttgagccttacaatgcttagtagttcatcttctttttgagcaaagactagaatactttcctcctaagagaaactcccaggtgataaaagttgatgccatcaaaccttgacaccgggtgctctgcacacccacgcggatgttgcacctcattctcccgatgactattcaaatcagcatctagaggctgaatgacaatgccaaacactccacctctgatcagaaccatgcagtgttaacactttaacctacattgaatctgattctacctgttaacttttaaaaagtcgtaagtttggatgaaagtgcaagatgtggaacatcaactacctattttccttgggtttttccactctgcaaactgtcctggtttttcacaccaatgaagtattatagatgccaatccaaaacctcagaatttcaggcaccacaaaaacaggtaattttctatcccttataagtttgtcttttctttcagaaacatctcttagcctaatttgaaatagcacaatcacaattcaaaatgtttagtcttctcactaattgagtctgcttccacgtcctctcccaggaacattcttagctcggactcttgaagaatctctttagattttgttggcaaaagccttatagaagcagtaagaggcttgaccacgccggaagagtcctggagctaaagctggaagacactcagctctctaagcaggggctcggccaaacatgggagttaagtgctgcttgtcttcccagtgttggtttgaaccctgtgagcctgagacagagagggccaggcaccaaccacaaggcgggaaagtccatgggtagaccctccccctggagggaagcatttctagtttttgctccttgactgtccagagtgtacaaatgttcataacgccattgaagggattatttcttgcatgcatatgctgaatttttttaagcaaatggatcatggcaccccaaaatgaaagttatagaaagctgtctacaactgtggagttggtagctggtaacattgttgtctcaagaacaactcacctctctccctaggactaatttttgtctctctcagttgaacatgttttgtcattcaagatcagtcaggtgcattctggcaactgacatacttgatggaggattgattcggtagagagcagtagaaatcttgttctaactgtgcctggtgagagactttggccccctccctccctataaggctgtggaacctgaggaagtagatacttgaagagattctgtttaggaagaaactcactctcttttgccagttgaatttatagagcattttttttcttaccaagatggccagtatcattttacccccacctcccaagccccaagaggtgtaccttttcagatgccattttacaggcggaaatgctccatgaaacaggaagccacttgcaagcaacatctgctctgttcctcaggtggggcccagagcccttccccgagactgctgatgtctgtaaccactggggagcactgccaaaaatacagctttctggtttgtgagcccataaatgacttaaatcagctttacatcatttttacatatcaagtggtttcatgttaaaaaacaaactcctagtcctttagaaataacagattctctgcacaaaaccacccattcattcatttattcattcacagcactagcaagtgctgcctatgctgagaacaagtcagatctgatccctgccctcatggacctgaccactcaacaaacagtccccaccacacctatctccttaggcaagactttgcctctctcctagtcctgagtataaatcctgtgcatagattcctctagaaaggcatcaaaaggctcaacagactgaatggcctcttggtctgcgaaaattcagttgcaatgaggatgaagtcactatcctagaggctgcttggcccagaagagccaggcacagagctgcagttgggcacgccaaggattccaaaggtggaatgagagagtagggtcaaactgtcacagtatctgctccataggtttctgtttttaatttcaatgttaaatacaactacaatatgagcgagaactgcattttcttgggtgttgagaacttgtaccatggacttcagaccgccttgcagccgtatgctgcacaagcgtgtacaccccctgggcagcctcaaaaccccgcttacagcagcaacacaggagatcatctgtccattttagaaccattaatctctttatccattgctgaacgactgtgactattcagtaacgaagtaatagtaattaattagtatggtataatctttaataaatttcgtgccaaaatgcatggttttccacttagcattcaaaatgttgcatagagagtagttttcaatttcttatgtactcttcaaagtaagttgaaaatcagtttctacattttaattcgtttcctgttaaatctgttgcactctcctgggctgtctttttctccagcagacccctgcatgcagttgtgtaaggactttctctaattcttgtgaatcgtctcacccgcagtaaccactgaacgtcaatcagccctccatggggttctttcgatttttggtgaagtattttgttacctcagtcttgtatcaagttgctgtatttttcagcttgttacattgataataattatttcactaattaaatactttaatgtacaaacatctttgtttactttgaaattaaatgtgttttccaatg

SEQ ID NO: 115 - DNA, 2116 bp, Homo sapiens
ggctccttacccacccggagacttttttttgaaaggaaactagggagggagggagagggagagagggagaaaacgaaggggagctcgtccatccattgaagcacagttcactatgatcttactcacattcagcactggaagacggttggatttcgtgcatcattcgggggtgtttttcttgcaaaccttgctttggattttatgtgctacagtctgcggaacggagcagtatttcaatgtggaggtttggttacaaaagtacggctaccttccaccgactgaccccagaatgtcagtgctgcgctctgcagagaccatgcagtctgccctagctgccatgcagcagttctatggcattaacatgacaggaaaagtggacagaaacacaattgactggatgaagaagccccgatgcggtgtacctgaccagacaagaggtagctccaaatttcatattcgtcgaaagcgatatgcattgacaggacagaaatggcagcacaagcacatcacttacagtataaagaacgtaactccaaaagtaggagaccctgagactcgtaaagctattcgccgtgcctttgatgtgtggcagaatgtaactcctctgacatttgaagaagttccctacagtgaattagaaaatggcaaacgtgatgtggatataaccattatttttgcatctggtttccatggggacagctctccctttgatggagagggaggatttttggcacatgcctacttccctggaccaggaattggaggagatacccattttgactcagatgagccatggacactaggaaatcctaatcatgatggaaatgacttatttcttgtagcagtccatgaactgggacatgctctgggattggagcattccaatgaccccactgccatcatggctccattttaccagtacatggaaacagacaacttcaaactacctaatgatgatttacagggcatccagaaaatatatggtccacctgacaagattcctccacctacaagacctctaccgacagtgcccccacaccgctctattcctccggctgacccaaggaaaaatgacaggccaaaacctcctcggcctccaaccggcagaccctcctatcccggagccaaacccaacatctgtgatgggaactttaacactctagctattcttcgtcgtgagatgtttgttttcaaggaccagtggttttggcgagtgagaaacaacagggtgatggatggatacccaatgcaaattacttacttctggcggggcttgcctcctagtatcgatgcagtttatgaaaatagcgacgggaattttgtgttctttaaaggtaacaaatattgggtgttcaaggatacaactcttcaacctggttaccctcatgacttgataacccttggaagtggaattccccctcatggtattgattcagccatttggtgggaggacgtcgggaaaacctatttcttcaagggagacagatattggagatatagtgaagaaatgaaaacaatggaccctggctatcccaagccaatcacagtctggaaagggatccctgaatctcctcagggagcatttgtacacaaagaaaatggctttacgtatttctacaaaggaaaggagtattggaaattcaacaaccagatactcaaggtagaacctggacatccaagatccatcctcaaggattttatgggctgtgatggaccaacagacagagttaaagaaggacacagcccaccagatgatgtagacattgtcatcaaactggacaacacagccagcactgtgaaagccatagctattgtcattccctgcatcttggccttatgcctccttgtattggtttacactgtgttccagttcaagaggaaaggaacaccccgccacatactgtactgtaaacgctctatgcaagagtgggtgtgatgtagggttttttcttctttctttcttttgcaggagtttgtggtaacttgagattcaagacaagagctgttatgctgtttcctagctaggagcaggcttgtggcagcctgattcggggctgacctttcaaaccagagggttgctggtcctgcacatgagtggaaatacactcatggggaa

SEQ ID NO: 116 - DNA, 3233 bp, Homo sapiens
tgcgactgagtcggtggcgaagacgggaacgcgacgatggcggagactctgcccgggtcgggcgactcgggccctggcacggcttctctcggcccgggcgttgcggagactgggacgaggcggctcagcgagctgcgggtgatcgatctgcgggcggagctgaagaagcggaacctggacacgggcggcaacaagagcgtcctgatggagcggctcaagaaggcggttaaagaagaggggcaagatcctgatgaaattggcatcgagttagaagccaccagcaagaagtcagccaagagatgtgttaaaggactgaagatggaggaggaaggcacagaagataatggcctggaagacgattccagagacgggcaggaggacatggaagcaagtctggagaacctgcagaatatgggcatgatggacatgagtgtgctagacgaaactgaagtggcgaatagcagtgctccagattttggggaggatggcacggacggccttctcgattccttttgtgatagtaaagaatacgtggctgcacagctgagacagctcccggctcagcccccagagcatgctgtggatggggaaggatttaagaacactttggaaacttcatcgttgaacttcaaagtaactccggacattgaagaatcccttttggagccagaaaatgagaaaatactcgacattttgggggaaacttgtaaatctgagccagtaaaagaagaaagttccgagctggagcagccatttgcacaggacacaagtagcgtggggccagacagaaagcttgcggaggaagaggacctatttgacagcgcccatccggaagagggtgatttagatttggccagcgagtcaacagcacacgctcagtcgagcaaggcagacagcctgttagcggtagtgaaaagggagcccgcggagcagccaggcgatggcgagaggacggactgtgagcctgtagggctagagccggcagttgagcagagtagtgcggcctccgagctcgcggaggcctctagcgaggagctcgcagaagcacccacggaagccccaagcccagaagccagagatagcaaagaagacgggaggaagtttgattttgacgcttgtaatgaagtccctccggctcctaaagagtcctcaaccagtgagggcgctgatcagaaaatgagctcttttaaggaagaaaaagatataaagccaatcattaaagatgaaaaaggtcgggtcggcagcggttctggtcggaacctgtgggtcagcgggctgtcctccacaacacgcgctacggatctcaagaaccttttcagcaagtatgggaaggttgtcggggccaaagtggtaacgaacgcccgcagcccgggggctcgatgctatggattcgtcaccatgtcgacatctgacgaggcgaccaagtgcatcagccatctccacagaactgagctgcatggacgaatgatctccgtagagaaggccaaaaatgagcctgctgggaaaaagctttccgacagaaaagagtgcgaagtgaagaaggaaaaattatcgagtgtcgacagacatcattctgtggagatcaaaattgaaaaaactgtaattaagaaggaagagaagattgagaagaaggaggaaaaaaagcctgaagacattaagaaggaagaaaaagaccaggatgagctgaaacccggacctacaaatcggtctagagtcaccaaatcaggaagcagaggaatggagcggacggtcgtgatggataaatcgaaaggagagcccgtcattagcgtgaaaaccacaagcaggtccaaagagagaagctccaagagtcaggatcgcaagtcagaaagcaaagaaaagagagacatcttgtcgtttgataaaatcaaagaacaaagggagagagagcgccagaggcagcgggaacgggagatccgcgaaacggagaggcggcgggagcgcgagcagcgggagcgggagcaacgcctcgaggccttccatgagcggaaggagaaggcccggctacagcgggaacgcctgcagctcgagtgccagcgccagcggctggagcgggagcgcatggagcgggagcggctggagcgcgagcgcatgcgcgtggagcgtgagcgcaggaaggagcaggagcgcatccaccgcgagcgcgaggagctgcggcgccagcaggagcagctgcgttacgagcaggagcggcggcccgggcggaggccctacgacctggaccgacgagatgatgcctattggccagaaggaaagcgtgtggcaatggaggaccgatatcgtgcagactttccccggccagaccaccgctttcacgacttcgatcatcgagaccggggccagtaccaggaccacgccatcgacaggcgggagggttcgaggccaatgatgggagaccaccgggatgggcagcactatggagatgaccgccatggccacggaggacccccagagcgccacggccgggactcccgtgatggctgggggggctacggctccgacaagaggctgagtgaaggccgggggctgccccctccccccaggggtggccgtgactggggagagcacaaccagcggctagaggagcaccaggcacgcgcctggcagggtgccatggacgcaggcgcggctagccgggagcacgccaggtggcaaggtggcgagaggggcctgtctgggccctcggggccggggcacatggcaagccgcggtggagtggcggggcgaggcggctttgcacaaggtggacattcccagggccacgtggtgccaggtggcggactggaaggtggcggagtggccagccaggaccggggcagcagagtccctcacccacaccctcatccccccccgtacccccacttcacccgccgctactaagtcccactcgctgtgagttttcgggtgggcagacgcactgttgaatctggtagccagggttccctcgaacttgggggatctttttaaaagcaaagtaaatcctgccaccatgttgtagctcaatacaatgtgaactcacttttttttttttttttaataaatgtgttcttgttctgccatttttaaatcaaggtttctgttaacgaggcattccattttccattaataaagtttaccattcgcaaaaaaaaaatgtgttcttgttctgccatttttaaatcaaggtttctgttaacgaggcattccattttccattaataaagtttaccattcgc

SEQ ID NO: 117 - DNA, 1195 bp, Homo sapiens
cgcgccggagcgggaccgacgggaccgagcgagcgaccgacgcgccacccgccgacgcctcagccgcttggggcccgcacggaccctctacttcagtgtagaatgagccaaggagactcaaacccagcagctattccgcatgcagcagaagatattcaaggagatgaccgatggatgtctcagcacaacagatttgttttggactgtaaagacaaagagcctgatgtactgttcgtgggagactccatggtgcagttaatgcagcaatatgagatatggcgagagcttttttccccacttcatgcactgaattttggaattgggggagatacaacaagacatgttttgtggagactaaagaatggagaactggagaatattaagcctaaggtcattgttgtctgggtaggaacaaataaccacgaaaatacagcagaagaagtagcaggtgggatcgaggccattgtacaacttatcaacacaaggcagccacaggccaaaatcattgtattgggtttgttacctcgaggtgagaaacccaatcctttgaggcaaaagaacgccaaggtgaaccaactcctcaaggtttcgctgccgaagcttgccaacgtgcagctcctggataccgacgggggttttgtgcactcggacggtgccatctcctgccacgacatgtttgattttctgcatctgacaggagggggctatgcaaagatctgcaaacccctgcatgaactgatcatgcagttgttggaggaaacacctgaggagaaacaaaccaccattgcctgactggctcttatcagtgttaatagcatctcagcttcctcagatcagttctatcactggcactacagaatccttctctttcttaaggcactttgcattgtagaatgttcctggatgttcatatctagtgtttgaaggggaggagggatttaaactggtcctgtacatagaaggtttgtttgacagaggagaaaaattagccaaggaagattgttgtttaaattcatttgaaaccagaaggggactttttagttgtatgtgtaacacattcattgaattattatcactgttttcttgggacaacatcaagcctaaatactgaacaatatgaagattcttttcttggcctttctgtggattatgtcatatataataattatcagaatcattctacttggctttttcc

SEQ ID NO: 118 - DNA, 411 bp, Homo sapiens
  misc_feature (1)...(411): n=a,t,g or c
ttcagtggagtcccgctaccggcccaacatcatcctctattcagtagggtcgtgtctgngcttcctggggggtacggtgtggtccgccgactgctgcgagaccaccttcatcgaggaccggtcgcccaccaaagacagcctcgagtacccggatgggaagttcattgacctctcagctgatgacataaaaatccacaccctgtcctacgatgtggaggaggaggaggagttccaggagctggagagcgactactcaagcgacacagagagtgaggacaatttcctcatgatgcccccgcgggaccacctgggctnagtgtctttncatgnttttctgcttctngcctttgggatngagccttntacttntccatgaggtacctgattcgcaaantttgcctggggttcctt

SEQ ID NO: 119 - DNA, 2754 bp, Homo sapiens
gaattccgccagccccgccagtccccgcgcagtccccgcgcagtcccagcgccaccgggcagcagcggcgccgtgctcgctccagggcgcaaccatgtcgccatttcttcggattggcttgtccaactttgactgcgggtcctgccagtcttgtcagggcgaggctgttaacccttactgtgctgtgctcgtcaaagagtatgtcgaatcagagaacgggcagatgtatatccagaaaaagcctaccatgtacccaccctgggacagcacttttgatgcccatatcaacaagggaagagtcatgcagatcattgtgaaaggcaaaaacgtggacctcatctctgaaaccaccgtggagctctactcgctggctgagaggtgcaggaagaacaacgggaagacagaaatatggttagagctgaaacctcaaggccgaatgctaatgaatgcaagatactttctggaaatgagtgacacaaaggacatgaatgaatttgagacggaaggcttctttgctttgcatcagcgccggggtgccatcaagcaggcaaaggtccaccacgtcaagtgccacgagttcactgccaccttcttcccacagcccacattttgctctgtctgccacgagtttgtctggggcctgaacaaacagggctaccagtgccgacaatgcaatgcagcaattcacaagaagtgtattgataaagttatagcaaagtgcacaggatcagctatcaatagccgagaaaccatgttccacaaggagagattcaaaattgacatgccacacagatttaaagtctacaattacaagagcccgaccttctgtgaacactgtgggaccctgctgtggggactggcacggcaaggactcaagtgtgatgcatgtggcatgaatgtgcatcatagatgccagacaaaggtggccaacctttgtggcataaaccagaagctaatggctgaagcgctggccatgattgagagcactcaacaggctcgctgcttaagagatactgaacagatcttcagagaaggtccggttgaaattggtctcccatgctccatcaaaaatgaagcaaggctgccatgtttaccgacaccgggaaaaagagagcctcagggcatttcctgggagtctccgttggatgaggtggataaaatgtgccatcttccagaacctgaactgaacaaagaaagaccatctctgcagattaaactaaaaattgaggattttatcttgcacaaaatgttggggaaaggaagttttggcaaggtcttcctggcagaattcaagaaaaccaatcaatttttcgcaataaaggccttaaagaaagatgtggtcttgatggacgatgatgttgagtgcacgatggtagagaagagagttctttccttggcctgggagcatccgtttctgacgcacatgttttgtacatttcagaccaaggaaaacctcttttttgtgatggagtacctcaacggaggggacttaatgtaccacatccaaagctgccacaagttcgacctttccagagcgacgttttatgctgctgaaatcattcttggtctgcagttccttcattccaaaggaatagtctacagggacctgaagctagataacatcctgttagacaaagatggacatatcaagatcgcggattttggaatgtgcaaggagaacatgttaggagatgccaagacgaataccttctgtgggacacctgactacatcgccccagagatcttgctgggtcagaaatacaaccactctgtggactggtggtccttcggggttctcctttatgaaatgctgattggtcagtcgcctttccacgggcaggatgaggaggagctcttccactccatccgcatggacaatcccttttacccacggtggctggagaaggaagcaaaggaccttctggtgaagctcttcgtgcgagaacctgagaagaggctgggcgtgaggggagacatccgccagcaccctttgtttcgggagatcaactgggaggaacttgaacggaaggagattgacccaccgttccggccgaaagtgaaatcaccatttgactgcagcaatttcgacaaagaattcttaaacgagaagccccggctgtcatttgccgacagagcactgatcaacagcatggaccagaatatgttcaggaacttttccttcatgaacccccggatggagcggctgatatcctgaatcttgcccctccagagacaggaaagaatttgccttgtccctgggaactggttcaagagacactgcttgggttcctttttcaacttggaaaaagaaagaaacactcaacaataaagactgagacccgttcgcccccatgtgacttttatctgtagcagaaaccaagtctacttcactaatgacgatgccgtgtgtctcgtctcctgacatgtctcacagacgctcctgaagttaggtcattactaaccatagttatttacttgaaagatgggtctccgcacttggaaaggtttcaagacttgatactgcaataaattatggctcttcacctgggcgccaactgctgatcaacgaaatgcttgttgaatcaggggcaaacggagtacagacgtctcaagactgaaacggccccattgcctggtctagtagcggatctcactcagccgcagacaagtaatcactaacccgttttattctattcctatctgtggatgggtaaatgctgggggccagccctggataggtttttatgggaattc

SEQ ID NO: 120 - DNA, 2454 bp, Homo sapiens
ggaataggttagtttcagacaagcctgcttgccggagctcagcagacaccaggccttccgggcaggcctggcccaccgtgggcctcagagctgctgctggggcattcagaaccggctctccattggcattgggaccagagaccccgcaagtggcctgtttgcctggacatccacctgtacgtccccaggtttcgggaggcccaggggcgatgccagaccccgcggcgcacctgcccttcttctacggcagcatctcgcgtgccgaggccgaggagcacctgaagctggcgggcatggcggacgggctcttcctgctgcgccagtgcctgcgctcgctgggcggctatgtgctgtcgctcgtgcacgatgtgcgcttccaccactttcccatcgagcgccagctcaacggcacctacgccattgccggcggcaaagcgcactgtggaccggcagagctctgcgagttctactcgcgcgaccccgacgggctgccctgcaacctgcgcaagccgtgcaaccggccgtcgggcctcgagccgcagccgggggtcttcgactgcctgcgagacgccatggtgcgtgactacgtgcgccagacgtggaagctggagggcgaggccctggagcaggccatcatcagccaggccccgcaggtggagaagctcattgctacgacggcccacgagcggatgccctggtaccacagcagcctgacgcgtgaggaggccgagcgcaaactttactctggggcgcagaccgacggcaagttcctgctgaggccgcggaaggagcagggcacatacgccctgtccctcatctatgggaagacggtgtaccactacctcatcagccaagacaaggcgggcaagtactgcattcccgagggcaccaagtttgacacgctctggcagctggtggagtatctgaagctgaaggcggacgggctcatctactgcctgaaggaggcctgccccaacagcagtgccagcaacgcctcaggggctgctgctcccacactcccagcccacccatccacgttgactcatcctcagagacgaatcgacaccctcaactcagatggatacacccctgagccagcacgcataacgtccccagacaaaccgcggccgatgcccatggacacgagcgtgtatgagagcccctacagcgacccagaggagctcaaggacaagaagctcttcctgaagcgcgataacctcctcatagctgacattgaacttggctgcggcaactttggctcagtgcgccagggcgtgtaccgcatgcgcaagaagcagatcgacgtggccatcaaggtgctgaagcagggcacggagaaggcagacacggaagagatgatgcgcgaggcgcagatcatgcaccagctggacaacccctacatcgtgcggctcattggcgtctgccaggccgaggccctcatgctggtcatggagatggctgggggcgggccgctgcacaagttcctggtcggcaagagggaggagatccctgtgagcaatgtggccgagctgctgcaccaggtgtccatggggatgaagtacctggaggagaagaactttgtgcaccgtgacctggcggcccgcaacgtcctgctggttaaccggcactacgccaagatcagcgactttggcctctccaaagcactgggtgccgacgacagctactacactgcccgctcagcagggaagtggccgctcaagtggtacgcacccgaatgcatcaacttccgcaagttctccagccgcagcgatgtctggagctatggggtcaccatgtgggaggccttgtcctacggccagaagccctacaagaagatgaaagggccggaggtcatggccttcatcgagcagggcaagcggatggagtgcccaccagagtgtccacccgaactgtacgcactcatgagtgactgctggatctacaagtgggaggatcgccccgacttcctgaccgtggagcagcgcatgcgagcctgttactacagcctggccagcaaggtggaagggcccccaggcagcacacagaaggctgaggctgcctgtgcctgagctcccgctgcccaggggagccctccacgccggctcttccccaccctcagccccaccccaggtcctgcagtctggctgagccctgcttggttgtctccacacacagctgggctgtggtagggggtgtctcaggccacaccggccttgcattgcctgcctggccccctgtcctctctggctggggagcagggaggtccgggagggtgcggctgtgcagcctgtcctgggctggtggctcccggagggccctgagctgagggcattgcttacacggatgccttcccctgggccctgacattggagcctgggcatcctcaggtggtcaggcgtagatcaccagaataaacccagcttccctcttgaaaaaaaaaaaaaaaaaaaaacc

SEQ ID NO: 121 - DNA, 922 bp, Homo sapiens
ccggctgcggcgatggaaccagcggacgagccgagcgagttagtgtcagccgagggccgaaaccggaaggcggtgctgtgccagcgttgcggctcccgggtgctgcagccagggaccgctctcttctctcgccgacagcttttccttccctccatgagaaagaagccagctctgtctgacggcagcaatcctgacggcgatctcctccaggaacactggctggttgaggacatgttcatttttgagaatgtgggcttcaccaaggacgtgggcaacatcaagtttctggtctgcgcagactgtgaaattggaccaattggctggcattgcctagatgacaagaacagtttctatgtggccttggaacgagtttcccatgagtaactgaggggaggggtactcagctccatctccaaagataaacctactccccacaagaactggcctttaatgtggtataactgttccgctgccttcttgtctgtgtgctaatataaatactgagtaccagcatgtccatttgaacatgcaaagggttaatcctgcttcctaaagcctcaagtacatgcctcctgcttagttcactttgtatcacatttcctaagctcccttttcccccagttttgggacactgtgcttacctccaaaaatctcatctcttccctggcattctccctaggctctgttttgcccagggctcccgctttttcttgctctagaggagcagtattcaaccttttagctatgatgacacataacaaaagatgtttatgtactaatagttgaaatctgcctttttctcattcaagaaggcatacaaatatctgagagtgactttgttgtatggctacccttgtgatctacagtaatttattctttctaaaagtaaagcattctcaaaacaaaaaaaaaaaaaaaaagg

SEQ ID NO: 122 - DNA, 1234 bp, Homo sapiens
tagttcaagacaacagagacaaagctaagatgaggaagttctgtacagtttaggaaatagaggctttcaaagataattcgcagtgatgtgaaactggcctcccaagccctgataacaacatggccaacgccctggccagcgccacttgcgagcgctgcaagggcggctttgcgcccgctgagaagatcgtgaacagtaatggggagctgtaccatgagcagtgtttcgtgtgcgctcagtgcttccagcagttcccagaaggactcttctatgagtttgaaggaagaaagtactgtgaacatgactttcagatgctctttgccccttgctgtcatcagtgtggtgaattcatcattggccgagttatcaaagccatgaataacagctggcatccggagtgcttccgctgtgacctctgccaggaagttctggcagatatcgggtttgtcaagaatgctgggagacacctgtgtcgcccctgtcataatcgtgagaaagccagaggccttgggaaatacatctgccagaaatgccatgctatcatcgatgagcagcctctgatattcaagaacgacccctaccatccagaccatttcaactgcgccaactgcgggaaggagctgactgccgatgcacgggagctgaaaggggagctatactgcctcccatgccatgataaaatgggggtccccatctgtggtgcttgccgacggcccatcgaagggcgcgtggtgaacgctatgggcaagcagtggcatgtggagcattttgtttgtgccaagtgtgagaaaccctttcttggacatcgccattatgagaggaaaggcctggcatattgtgaaactcactataaccagctatttggtgatgtttgcttccactgcaatcgtgttatagaaggtgatgtggtctctgctcttaataaggcctggtgcgtgaactgctttgcctgttctacctgcaacactaaattaacactcaagaataagtttgtggagtttgacatgaagccagtctgtaagaagtgctatgagatttccattggagctgaagaaaagacttaagaaactagctgagaccttaggaaggaaataagttcctttattttttcttttctatgcaagataagagattaccaacattacttgtcttgatctacccatatttaaagctatatctcaaagcagttgagagaagaggacctatatgaatggttttatgtcatttttttaaa

SEQ ID NO: 123 - DNA, 446 bp, Homo sapiens
  misc_feature (1)...(446): n=a,t,g or c
attgattaaaaggtgacctttcttattggactgataagacaaaaatatagattccaaatctattgacatatgatatcacatccacaaatgtttgcctatttttgtagcattattttggttgcaaagtctcttagggaatgcacaaaaataatacaaccttaaaaatcagactagaagatggaatataagtggtttccttgtaatttttttttaagcttggagaggtaataacacatctttgaattcaaactgaggactgctgcttaatggtgcttttacagggtggttctaaaatttttgagagtcaggtattgctttctctgactgtttaattcaccactggcacgtgtttcctatcctcaagcataagtttaaaagattacaaacctcatgctgctcagttttttctntccagtaaatcagatgcatggtttctctagatttag

SEQ ID NO: 124 - DNA, 644 bp, Homo sapiens
  misc_feature (1)...(644): n=a,t,g or c
tggaagaattgattttaaccttttctatgcaaacacaatctgaaaagttatgtgctgcatattgtgctcaaaatgttttatactctccacaagctgcaattaagagattcattcctatttttaaaatttagatccacatgggttagagaaaaatactctcaaaagtgagttcctagagaatattatccctttgcctcacagagattttaacctgcatttaagagtaagtgttaggttgaggcatatgatattgtcgcttttgcagatcagcaatggttgaacactggcaatttcaatatggttcaaccttgcacatgactcaagtgtaaaanaaggagaaaccttcaagtattccttatttcttccaatagggggtacactttttttggtacagtggagatccaacccaaagtacgcaagcctcttctctcccctgatggtgggtagctacaggcagttacantcccttggctgcctgtgagaagcctacantttggcattttcctcccnaaaattaccacggtngaccaagtgaacattnccagnatatngacctgggtaatgggggggaagggggagttgagcaacnggtggaaatattttacngggatttccaacatanggcagcctttaagggaatttta

SEQ ID NO: 125 - DNA, 523 bp, Homo sapiens
  misc_feature (1)...(523): n=a,t,g or c
gggggaaattactttaaaaaagaaaaaaagaaagaaagaaaagcagaaagtggacatcgaccagcacctgtgtacgtacagtacaccttgcagccgaatgcaaggttacttcatcctatggtaaaggtcgcccccagcccggtagccagagatgccactctttctgcccagctaacaccattgtgcgcctgtgtgcgagtggtgccagcataacctcaatcacaccaatattgctgccaccactgctttactggctccgactgaacacagcatagaagagtcaggagagaatgcacagctgtacacccaattctgatgccccctcaatactttcatcatgtttccatcatctttcaggtcccatactctgagagttttgtctcttgaagctgacaccaggatcaagttccatctggagcaaaagttaaattctgaccacttcagtatgattaccaagttaaggaggagtttctgtatatcatcccatattttgatcgccattgttcaacctgtancaagagta

SEQ ID NO: 126 - DNA, 746 bp, Homo sapiens
  misc_feature (1)...(746): n=a,t,g or c
ttnnncgggagnaacacaacaagccgagtccgccgcccctgcacaacaacaacaacaactgcgaggaaaatgagcagtctctgcccccgccggccggcctcaacagttcctgggtggaactacccatgaacagcagcaatggcaatgataatggcaatgggaaaaatggggggntggaacacgtaccatcctcatcctccatccacaatggagacatggagaagattcttttggatgcacaacatgaatcaggacagagtagttccagaggcagttctcactgtgacagcccttcgccacaagaagatgggcagatcatgtttgatgtggaaatgcacaccagcagggaccatagctctcagtcagaagaagaagttgtagaaggagagnaggaagtcganggttttgaagaaaagtgcggactgggtntcagactggtccagtagacccgaaacatccaccccaaggagtcccacttcaganaccctaacgtcttgtgttttttaggatgatggatcagtgtncgtgtntnnnnnnnnnnnnnnnnnnnnnnncnnccnnttttgtnnntnnnnnnnnnntnnnnnnntntnnntnnnntnnntnntnnnnnnnnccnnnntnnnntttnnnnnntnncntnntntnntnnnnnnttnttnntntnnntnttnntnnnnnnnntntncnnncttntntctnnncnnnnnnnnnnntnnttncnnctnntnnnnnnnntnntnnct

SEQ ID NO: 127 - DNA, 448 bp, Homo sapiens
  misc_feature (1)...(448): n=a,t,g or c
ctcagattcctggacctggtgtcctggttgggtccaaggtgattttacagaagaaaaaaacaactcaagcattctggtggcaacatagagattgtaggctgcttctaagaaagttattaacaatttggaaattcctaagtaggatgagagttagtaactggatacgagtgaagtttatatccaagttcagactcaaaggcattattatgatttgcttcttcccatgtcttccatgtcctgcttctcaaagtttttctcatccatcacactactgccttaacctgctctgagtatgcatttgttttcaattcatctttatttcaatctgtttaacttttgaatccgcatgggaatacgcacattaagttcctttctaaaataaggttttatggaagctngagtgagtttcacgataagtgtccttgctattttttgagatgttttatgg

SEQ ID NO: 128 - DNA, 1650 bp, Homo sapiens
agcgagccgccacggtatgaccccaggggctctgctgatgctgctgggggcgctggggccgccgctcgccccaggcgtccgcggctcggaggcggagggtcgactccgggagaaacttttctctggctatgatagctccgtgcggccagcgcgggaggtgggagaccgtgtcagggtcagcgttggtctcatcctggcgcaactcatcagcctgaacgagaaggatgaagagatgagcacaaaggtgtacttagacctggagtggactgactacaggctgagctgggaccctgcggagcacgacggcatcgattcgctccgcatcacggcggaatccgtgtggctccctgacgtggtgctactgaacaacaatgatgggaattttgacgtggctctggacattagcgtcgtggtgtcctccgacggctccgtgcgttggcaacccccgggcatctatcgcagcagctgcagcatccaggtcacctacttccccttcgactggcagaattgcactatggtgttcagctcctacagctacgacagctcggaggtcagcctgcagacaggcctgggtcctgacgggcaagggcatcaggaaatccacattcatgaagggactttcattgagaatggccagtgggagaatatccacaagccctctcggctaatccagcctccaggcgatcctaggggagggagggaaggacagcgccaggaagtcatcttctacctcatcatccgccgcaagcctctcttctacctggtcaacgtcattgccccatgcatcctcatcactcttctggccatcttcgtcttctacctgccaccagatgcaggagagaagatggggctctcaatctttgccctgctgacccttactgtgttcctgctgctgctggctgacaaagtacctgagacctcactatcagtacccattattatcaagtacctcatgtttaccatggtcctcgtcaccttctcagtcatccttagtgtcgtggttctcaacctgcaccaccgctcaccccacacccaccaaatgcccctttgggtccgtcagatcttcattcacaaacttccgctgtacctgcgtctaaaaaggcccaaacccgagagagacctgatgccggagccccctcactgttcttctccaggaagtggctggggtcggggaacagatgaatatttcatccggaagccgccaagtgattttctcttccccaaacccaataggttccagcctgaactgtctgcccctgatctgcggcgatttatcgatggtccaaaccgggctgtggccctgcttccggagctacgggaggtcgtctcctctatcagctacatcgctcgacagctgcaggaacaggaggaccacgatgcgctgaaggaggactggcagtttgtggccatggtagtggaccgcctcttcctgtggactttcatcatcttcaccagcgttgggaccctagtcatcttcctggacgccacgtaccacttgccccctccagacccctttccttgaagactggagggttgagaccaggccccctgccagttgaagtgagagagtttggtgatactgtcaagccctatccttctctgcctcttaactccttcacgaggaatctgggcctcttatttcgttctggg

SEQ ID NO: 129 - DNA, 983 bp, Homo sapiens
cgcaggggtcccccggccgccgcgatgcagaaatacgagaaactggaaaagattggggaaggcacctacggaactgtgttcaaggccaaaaaccgggagactcatgagatcgtggctctgaaacgggtgaggctggatgacgatgatgagggtgtgccgagttccgccctccgggagatctgcctactcaaggagctgaagcacaagaacatcgtcaggcttcatgacgtcctgcacagcgacaagaagctgactttggtttttgaattctgtgaccaggacctgaagaagtattttgacagttgcaatggtgacctcgatcctgagattgtaaagtcattcctcttccagctactaaaagggctgggattctgtcatagccgcaatgtgctacacagggacctgaagccccagaacctgctaataaacaggaatggggagctgaaattggctgattttggcctggctcgagcctttgggattcccgtccgctgttactcagctgaggtggtcacactgtggtaccgcccaccggatgtcctctttggggccaagctgtactccacgtccatcgacatgtggtcagccggctgcatctttgcagagctggccaatgctgggcggcctctttttcccggcaatgatgtcgatgaccagttgaagaggatcttccgactgctggggacgcccaccgaggagcagtggccctctatgaccaagctgccagactataagccctatccgatgtacccggccacaacatccctggtgaacgtcgtgcccaaactcaatgccacagggagggatctgctgcagaaccttctgaagtgtaaccctgtccagcgtatctcagcagaagaggccctgcagcacccctacttctccgacttctgtccgccctaggccccgggacccccgcctccaggctgggcctggcctatttaagccccctcttgagagggtgagacagtgggggtgcctgg

SEQ ID NO: 130 - DNA, 454 bp, Homo sapiens
ttttttttttttaaagttaactattttaattagaatttttattttgtgcttcagggccacaggataaaataactacatttagcttgcctttcagtgacgcttttgccaaatgtcagctacaaggagtcatctccctcaccgccaagctgtctagcagccagagtggtagctttactgtaacacacagtactttttgtaatcagactcaaagtcttcatccatactgcttgtgtctgccatctttttgccatcagtctttggcagaaattgtgcatagtctatcccctgctgctcatagaaaagaatgtaggcagagtcggtgtcaatttcatccgggtgaagttcctttacagctgctgtcattgtaacagtaccacttgcagtttgggtttttggcataagtgacgtaatgggcccccacccagaattccccgaatggcacgaaattggcata

SEQ ID NO: 131 - DNA, 552 bp, Homo sapiens
  misc_feature (1)...(552): n=a,t,g or c
ctcccagcagttcttagcattccactcaagatggtcaaggatggggaaaagggcctttgctggagttgccagctagaggcattctcaggtagctaggtgtagtgtattttggtgcctctggtctctggggcaatgtcttttgtcctccaactgggtatgtatggatactgtgattccaggtctgttttttgacttaagaactgctcccagatttccaaatggaagttttcacactatgacctagaaatgaatagatatacattctgtcttgggtttcctaagccagtctcctataaaacaaaaatttcatcccaggaactcttccatataagggaacatatatgttttgaaaataattcatccatttctttgctcccataaataccttttgcccaggatttattcaaaaaaaaagaaagattgctacttaatgtttctattccattggagtgagtgatttattcattggaggtctaagtgatgatcatagaaagaaacatagagtactagaactggaaggaactaatctcnattttataggactctcgtgcc

SEQ ID NO: 132 - DNA, 545 bp, Homo sapiens
  misc_feature (1)...(545): n=a,t,g or c
actgttgacctgtcactgtttattatttcagcactaaaactgaggagcctcaactgctggctcttcttccctttgtatttgtgtaaggagcactgcactcccataaaaggttttaaaatacaaaatgtacaagaacacacaattccaagtgctgtaaacataactgagaaccagttcctttactaaacatccattttataaaatacaaggtttcaatttgagcccatctgagccttaaagatccattctgaataccaaaaacagggcttcacagccaggcccagaagaggtctggtgataatggctggccctgggtggggatagtttacacccgggcagcagcaccacacatgaacccaaagacatgttctttttaaagctgttttcagccatgtttctctggtgcatctccagtaagcagaaggctacccattccattcctcaaccccaagagctagcacagttagagtaggaggggggtgcgtactagcacgtgnccagttgctcagtgcggcaggtagaaatgatttgcataggtccatggg

SEQ ID NO: 133 - DNA, 384 bp, Homo sapiens
ttttttttttttttcttaaattatatttattatatgaaatacaaaatgtggaaaatttggaaattacagaaaaaccaaagatgaaaattacagtgactttgttccaccatacaaagataaccactcaacattttttagtatgccttccgtcttttttatctgctctacgtatacaagcatacacccatattttaaaaaacaaaattgaaatcacataacatgcactatttttacaaccttttaatattcaaggagcatttttctttcagtcagatgttcttttacatgacttttaatgtctgcgcggtactccaccatctggatggagatacaataatttacttaagcaatcccctattgcaaactttcgttacagcagaaaag

SEQ ID NO: 134 - DNA, 168 bp, Homo sapiens
ttttttttttttttttttttttttttttcaaaacaagtgttatttattataaaatcagtggcttctgattagaagactttttttttttaaaccaaataggctcaagaagctggctggaggttgaattggctgacgaacatcttcttcctccaccagcagtttgtggga

SEQ ID NO: 135 - DNA, 175 bp, Homo sapiens
gcaggctgatacatgtgggggattttatttcaggcacttgctcttcagtttttcttacacgatgttccacaaatataaaaatgagaaactctttcagattatctgtatatctatatacctggattattctggctaaagcgacaggaaatcccagcagtctggcttccccgagtaa

SEQ ID NO: 136 - DNA, 246 bp, Homo sapiens
ttttttttttttttttggaagaaaaggaaggggtttattctcaagcgtctaagggtttacaaacgagggcattttgttttaaaaaggggcagggcgacactggcggcctgaggaggggtccattggctggtgggctggccgagccaccctcaggcccctgcccacccggtccgccctctgcctggtccagagggatggctggtgacgaggggggaggtcttgggagaggctgggaggcaggagaga

SEQ ID NO: 137 - DNA, 263 bp, Homo sapiens
aaacaataaacagaatttattagctcatataacaaaaaaagtccagaggtaaggccaatctcaagcaaggcttgatcctgtacttaaacaatttcaccaaggacttgatctctttctgcctctcaactctcccttcagtggtgtcagcttcacgtgattcctggtcatgatcccaaggcccaaggtggtcatcataaagacccaggaatactactacctttttcacattcaacaggggaattaaaacagcttctacccagcat

SEQ ID NO: 138 - DNA, 394 bp, Homo sapiens
ttttgtcactctgttcttccatgcctttattggtaacagcaatggacaagaacaataccaggcatagcagacaccctagcccagtacctgaggtgccaggcaggccctgaaggcacttggcacatccagtcccagcccaagatccagtctacccaggccatgtccccgaatggcaggaggcgtctgtccagtttgtatgtgtggatcagtctctctgagtgtctgagccgctgcctgcagggcccccccattctccgcacatggtaggggctgttaggaacatagcgtggcatcccccggtggaccactgggccccagtgctgaccatggggattagggccagggattggaggtggcagagggccaggcacaaagttcactccagggccacatc

SEQ ID NO: 139 - DNA, 303 bp, Homo sapiens
ttttcattttgaaaaagctatttactttttttccaaatattatcccaaaaggtgttttacagataagggtcaatacgaagtcaaacattctacagaagaaaatcgtttttacagacattaagaataattttaacagaagaaaaagctcacatctatctagatgtggctatgttccatgggaaaaatttcagcatccaaagtgcaaagaaaaaatgactgtagcttttcttaccacaaaatattgacaatcttcccttatagcctactctttattgttagttgggatgccaaaggatgatatat

SEQ ID NO: 140 - DNA, 280 bp, Homo sapiens
  misc_feature (1)...(280): n=a,t,g or c
gaacaaaacagaatgttattttattttgtgtctaagagtacaaaantcataatcaccaacctcttgggaatcccaaggcaganttttagtcccagaccccccaacatcctcactacatacatggaagttgctttactcctttctaccttagttatttgacctataattagaggataaaatacaacattctaaaatcctggtaatatggccgatatataattttatttttgatgtgggtgagagtcttgaagtctggaaagcatttaacttattaaaagac

SEQ ID NO: 141 - DNA, 495 bp, Homo sapiens
  misc_feature (1)...(495): n=a,t,g or c
tttttttaaatttaaaggagtttaattgagcaataaacagttcaagaattgggcagccttcccagccagagtaggctcggacactccagcgcagtcacacggtggaaggtttgcggacagaaaatggaagtgaggtacagaaacagctgggcttggctacagcttggcatttgccttatctgaacgtggtttgaacagttggctacatttgattggccaaaactcagtgattggcacaagtgtagtctgtttacacctccacttgtcacgatatacagacaaacctttaggccaaacttaaatatataaggaggcagctttaggctaaactttatttcaatacctgtattccaacactttgggaggccgaggcgggagggatcacttgagcctaggaagttagagattcagcccaagcaacatagtgagaccttgtctctgtggaaattaatttagccngggcttggtagcctgtaccngtagtcccagctactc

SEQ ID NO: 142 - DNA, 402 bp, Homo sapiens
tttttttttttttttcttagttaatatctttaattttttatgtagaatatactatttttttctccaccaaaataacaatatatttgcaggcgggaacatgtatgattttaaatgcacttttgaaatcttagagtagaaccactactctagtaatacttgtaataaaattaaaatagttttaaacacttccataaagaattaggggtgcccagctccttgatttccccctagggataaagatatccatgtacaattccagggagcttccctgtaattcctcaaaaaaggcactagtaaaactcttaggagggatattaggataaaggctcacttaggcaatagccctttttccccacatattctgggagggttctacaaaagctatttggatactcattccgg

SEQ ID NO: 143 - DNA, 463 bp, Homo sapiens
  misc_feature (1)...(463): n=a,t,g or c
ggtanngatcngtgtatttataatcaagttgaatcaagagtgacaagaagaaatacagctagagttatatttttgccccaggggtattcttttcctagaagagcaagtccatttttagaaaatttaaatgtctttatttgttactttccaaatattttggttaaacaaatatctcttgcaaatgtatcttcaaaatctttgcctacatgcatacaatttgttcttcccaactgcttaggggaaattccttcaaaatgcttagggagttctaacacatcaaatctgatcattttgtttacattagggaaacaccaggacattgtgggatctcttctttaaaaaaacaggatttttattttactggcattttcaccctcaggacatgtctcgtaaggtntgaggggttaggctaggnaggggggngggttccagggcaacacatttaccaaatggacncccgggg

SEQ ID NO: 144 - DNA, 466 bp, Homo sapiens
  misc_feature (1)...(466): n=a,t,g or c
aaaaattgtaaaattaaggtgaaataattgggaatataaaaccccaatgtaagataaagcaaattgctttattatttttaaaaatgaagagaccccaaatacaganttaagcagtaaaaatcttttgtagttctttcattaatctgtatgatccaaactcaagtacgtaattttttcttttttaagaggcaggttttgctttgttacccaggctggagggccatggcaccaccacgcctcacggcagcctccacctcatgggcatcaagtgatccttctgcctcagcctcccacgtaggcagggaccacaggcggaanacccatgctcagttattattattattatttttaggagacaggggtcttggctatgttggcccgggnttgtcttaaaactncggggctcaagtaatccttccacctcagtnttcctaaggtacgtaatatttttaataggcaaaccatt

SEQ ID NO: 145 - DNA, 385 bp, Homo sapiens
  misc_feature (1)...(385): n=a,t,g or c
anncccagataagtgtgcaattatggagaagtttatctgtaagaacagataaagggaaattgtctacacatgtgcatgtagaaagaaattatggagatggattcagccctcaaagcaaaagctctatttaatttgaatttttacttaaatcaaaagcagaaaatttaaattgtcactaatcttaactggtcaagggcatgatgcatcagtctcataacctgggcaaaaacctgcccttaaatgatcaggtcagaaccagtaagagtctctatcctgggtcctcggtaatacagagagctcccaaatnaaattatatgtattacagagccaattcagcccaatntacagtctctgattttcacatggcctacacaaactttatgtt

SEQ ID NO: 146 - DNA, 372 bp, Homo sapiens
  misc_feature (1)...(372): n=a,t,g or c
cattaacttgacatctggtaaaacaaaattttgcgtanatctaaatcaaaacaaanaacagacatgacactttctcagttaaaatagtttaataaaagcaacaaaactgtgctaacgatcagaatcaaaaatgagatattaggtagacttataaaacaaagtatagttattttttgatttcaaataaaccatgtgcaaaattgtaaaatgccaatgtgtctgagaaaagcattaacagtccttttagcaatttatatataaagatgtttttaaagtgccacagcttaaggcattatattttaaagtttaataaacatctaatttcaacatctctccaagaacagacttcttctcaataagctataaactatt

SEQ ID NO: 147 - DNA, 463 bp, Homo sapiens
  misc_feature (1)...(463): n=a,t,g or c
cttttcatatttcaactttatttaaaatatgaggttttatgtccagaagggagggcagttgccatcggaaggtgaagtgaggcacaatactattgggttgcgggccaagtacacagggttgcactgtgaaggaactgaggaggttctgggagggcctggtgacaacaatggatttggggagatccacaaaggaaattttcatttcctccccaggttagctattcagtgggtggattattcagtctttttaagcaaggtcactgctccttagcaacatcaacaaaagtgccaaagctgaggacacagagaataccatcattgtcttttgtttctctttatgcctggatggggaaaggaatggaaactaatagcagaaaatgaaacatttcnggatgttatcccttgccatgaagaatcacgggcttgtgtagagacctctttcctttcntttttttttttgagg

SEQ ID NO: 148 - DNA, 468 bp, Homo sapiens
  misc_feature (1)...(468): n=a,t,g or c
catctctccttttttctttggactttcctgagaccccctctccttggccagccggtgtctgcatcttgcagctctttcagctgtaatccactgttattataaggagccctgttgctgtggtggtaaggagtggggaagggaagcattccattttcttaggattacatctcaatcttttggntgggcctatgttgctgtactgtgacctttacaaatgtttcttaacctttttcctccttccttaggttgacacagggaatctaggagggtgactcgagtcagaggaactatcttctccccaggatgggggataaggactctggggtaaaggcccttttccntggggagaggtaaggtctttaatcataggggggaacatttctgagggcgcactttcaaagggcatttacntttccccttnccctttnccagagccnggggggaaggggtntatcttnggggtctttt

SEQ ID NO: 149 - DNA, 496 bp, Homo sapiens
  misc_feature (1)...(496): n=a,t,g or c
tttttttttttttttctttattaataaattttatttttagcacaatcatttacccaaaaagagagtttgagaatgttcgagaatctctaccactcggtaaccatgctggctgttatatcagaaaaatccataaacatacacagcagcgagctgttttcacaagacttcctgctaataaacacaacactttctcctccactcagatgggagcctcagnatgccaaaacggcaggatgtgccaactaactatagggctcgttgctaaggcaggaggaaatctattcaagtttgtccaggcaaattcgattgtacagtggggatgggcgtctgcttctgcgggccttgggacaggggaggccactgggtctntgctggctgttcccctgtagggcagggtcgangctgggtnggccctttaggagggcaagggttaaaatgggtttntcatgggggtttaggaacataaggggntttttgaggnaaaaattgncaaatt

SEQ ID NO: 150 - DNA, 438 bp, Homo sapiens
  misc_feature (1)...(438): n=a,t,g or c
ttttttttctttataagtgctttaattaaaaccaatcttattatgaaaaacaaaccaaaaaaaccttgcattgatggatggtagctatttgcaatttcttgttttggctggatgcattgaaggattaaaaatttaatatttaaggtgtgccttaaactgcaaggttccctgattttattctcatctaggaatttttgctgctttaggtagctgacaacatgcagatccatactctatctcttaagattttcttttgggaactgattccagggtgaaattttcttaggggaaggatgtgggctaggaggctggggtatggcaaaggcatgttctataggcaagggaaaggccaggatggaggtgagggggtcaaaaatctaggttattaaaattttagggggngacactngggttttaaataaacntatttcttcccac

SEQ ID NO: 151 - DNA, 371 bp, Homo sapiens
  misc_feature (1)...(371): n=a,t,g or c
ctggagcnnttntnnttttatttgctcaatgaaaatacttcgtccttttttatcagcaatacatatagttccaacaagaactattcatcacaaactgccagcctggggatttcttcatgaaatattttgtatttgcttggtacatggttcaaggaaactcttgtgtttgtgccaatcagggaaataaactgaacaataaacgacactgaaatagagtattaggcaatatgtagctttgtttttgctttttttttttaaaaaaaaaccactgaatttttttccacccacaaacacatgggaaagtgcaggaaaccagttaatctatggtgatggtatttgccatacggtttacaaacnaggccaaattaaaa

SEQ ID NO: 152 - DNA, 353 bp, Homo sapiens
taaaatgatcttacaatgtcaacatcaatgttaataaaaatatataataggctgaattcatcaatgatagaataagttgtaattcacttggaggttccatctttcaaagtaagcctttcatagataaatgaaaatcctttattttgtagaattttaaagattgttaaaggctgggtcaaggcaaagccacctctattagaaggggaaagaaaagcaagatgaaacaaaatatgttatcatacatatcgcgtgtgctatgagcatctttctactcctgccagattgaaaattctaggtttcaacattcttcaggatttaacaagtcaaaataaaagccggaattcaaatctagg

SEQ ID NO: 153 - DNA, 429 bp, Homo sapiens
  misc_feature (1)...(429): n=a,t,g or c
agctcacgggcggcaggcagaaccttccttttagtgagttgtaaagtcagagagaagctgaaaaattagagtgagaccacttattatttaatgatttttaagagcagggtcacctttaaaccagaattggcttgaaaatggagactgtgatatgcacggctaaaataagggaaatgtccatttgaactgagactagaaagcatgactttgcattgcagctggctctgttgataaaaatccctcatccctttgagtgttaaattgaaagactangaaagcatttccaaggcgaagtgcttcatgnctgtctctcaggnttcccacagctgggtcccggggcatgcctgttctggatgctctncattgcgagggaaactgccnttcacccntagctcgtaatcccagctnctcgggggggtcgagggcagg

SEQ ID NO: 154 - DNA, 203 bp, Homo sapiens
  misc_feature (1)...(203): n=a,t,g or c
actttcttgaatttatttttatttcaatggttttaatgaatatttccgagaaagttcacaatactcatttttatgtttcaatttatattcaaatttactcaaagntaatatcacccggtattattagagaagtctctctaaatactagaactgacatttcagatccntttgtaataatactgcccccataaaatatgcatagg

SEQ ID NO: 155 - DNA, 319 bp, Homo sapiens
tttccagtataaattatttttaattttagaaactgagattgaagtacagtttttagtttaaaatattaaaaatgaaaaaacctttaacattattaaagatgtgttgttacaaagttcctagatatatacatgtacaaaacaaatagatattactatctgacacctcaacccatgacttaccctaaatctcctgatatgaacaattaatctactgggaggcttttcccaataagtttcaaatttcttgcacaaagatttgctgccattcatattctgtgcatggatgaggacatttaatcacagactatttcaacttaat

SEQ ID NO: 156 - DNA, 276 bp, Homo sapiens
tttttttttttaggacaaataaaatttatttttctctgtaaattcatttaaaagtatgttatctatgattatcctatcaaggtcagaaatgttagatcttactccaagataggtaaacagccctttgaaacgcaacaaaaagagacgatgatcttatgagctcatttatgttcatgcgtgaaagtgtgaagatcactagctttgctgtgtttctacaagtttccttgactgtaaaaacagtcaaaatgtaaccaacctaattcaagatgttaaatt

SEQ ID NO: 157 - DNA, 549 bp, Homo sapiens
  misc_feature (1)...(549): n=a,t,g or c
tcctngcnngggtcgttactgttcattaggggagaaagcagtttaaaatgtctcagcctctcgcctttcctccaatcaacacaaagtatattagacaaagtggataaagactggcattgacatcttccaaatagcaaaatcaattttataatttaaagacaaaaaatgctttaactgcagagggcatttaagacgtttcacacttacagggctaatgaaatgcaggactagcataaaagttttttggggggggtgggggagaatagattttttaacataaggagtcgataggnaatctttaataatttttcccccccaaataattttaaggtgctttaagggccgcgggatcncggggggggtttccccctctttttaccttattatggantttaccatattcctnaaaaatggatttaaatccccattnccccttcaggccncaggggggnaaggggggaaatttgctgtgggggcccctttntttaggggagggtttcctcctccaggcngctcctctttaccgnccccgtccggtttcgggccctg

SEQ ID NO: 158 - DNA, 378 bp, Homo sapiens
ttttttaccttttggcctgaatttttttttaatttttaaattaaacaccaacgaaaacctcattttgtctaagcagattgaagagaaaaaatgagctatactgatagaagctgaaaaaagaaattactgtctacacgactaagaaaaagaccaagcaagtgcaatgagtaataagttatagaaatagcagcaactccacaagaaactgataagcatctgccactatcaactctatgctagatgccaggcatacagtgaatgtgatgtgcccacttcattcaagaagctcatcaggtgggaagaccaatgaggtatcagtttaaggtatgaggatgaattttataggaaagcaggcatcccaaatgttcccttatttcc

SEQ ID NO: 159 - DNA, 307 bp, Homo sapiens
ggtcatgctctgttgcccaggctggagtatggtggcaatatcataggttcactgtagccttgaactcccgggctcaagtgatcttcctgcctcagccttccaagtagctggcactgtgtctgacaaagttcacaactttgtttgtggtcacaaagcttttcagcaggaggcagctatttttggtaccttgctaagatctagtatatcactatacgagaccctacaaaaacacacaaaaaagcaattcctcatttactatgttcaaggaaacggcatggaaataaaggtaaatttttagggcaaaagg

SEQ ID NO: 160 - DNA, 290 bp, Homo sapiens
caagatctctattggctttgctttggttcctgtttcccccctaaaaaaatctaacttctaaaaacattctgctcagacaaccatttcaagttataggacacatgctctaaaggaaaccatccaggagaaacatttgcacaagttctcctatgacttgagattgcatctgagaagggtgcagggggagaacagacagaaacagcccactctgtgtgcagaacgccgtgtgtcctcagtgtttctcggggcccatagctcattagctgcagttggtatgaagcctgcaacct

SEQ ID NO: 161 - DNA, 246 bp, Homo sapiens
  misc_feature (1)...(246): n=a,t,g or c
cacattttcaccattttattcattaatgttgtcagatggtttagtggggcatgtggggaaagaagggtaggagttgtccccccatccccgtgcacaggtcaggacatgctgggggctcctggagggagaggaggatggggtcagcctagcccctcccaccccagatttntgcgagggcccccaggatggagggtggtggggggatgggcagacccttcagtccagggtagggaagctgagattata

SEQ ID NO: 162 - DNA, 344 bp, Homo sapiens
  misc_feature (1)...(344): n=a,t,g or c
gcttgtncaggttctgtttattatgtnctcacagccttgtttatagtaaaggtgaatgacatgattccactttacacgataatgaaaaaactcaatgaggactccatcagccaagcggtttatatggcagatgagctgctacaaatctgttgtgtgctcgccgcgtgactcagctaatgctaccggggttggagcgcacaccgagcccagccaccttttccatacctggcagagggaagggagtggaaggaccagaagggagtaagantcaggaaaggaacagtttattgaaaggacccagagcccaacctaggaaggccagtggcccatcctgaaatctctca

SEQ ID NO: 163 - DNA, 162 bp, Homo sapiens
  misc_feature (1)...(162): n=a,t,g or c
cagaccctcctttatttcctgancgatgtcacagcagccgtaaaagaaaaccagatgaccccaaccaacctggccgtgtgcttagcgccttccctcttccatctcaacaccctgaagagagaganttcctctcccagggtaatgcaaagaaaacaaagtttg

SEQ ID NO: 164 - DNA, 451 bp, Homo sapiens
  misc_feature (1)...(451): n=a,t,g or c
gcagaggcctccactttttatttcagttgtactcatctgtcccactgtgcaaatggagtcacacgctcactcaattctgagaggcctggcaagnaaagagaaaagatgcccagagcagtctgttagagttgcattctcagactaatatctttacagtcttgagaaatcactgtcagggtttatttaaaatgcagatttttgaaggataaattttacgactaattttttttaataaactatgcaggattgttatttagaagatttgccaaatttagagtcttcagcgatggaaataattggccttcttgtcacagtcttctgtttataagtgggtaaagaaagttttctttccagaaaaatacagcagaaaatccgatggttctgataggagttaattgtggagatgtgccagagacagcagcttcgtggatggtgacaccacaatgtctgt

SEQ ID NO: 165 - DNA, 306 bp, Homo sapiens
  misc_feature (1)...(306): n=a,t,g or c
gcatgtattcttcaattcagggtcctggtaatcactggaaccacaagttcaaatgccatctagaccataaggactcttataaaacacaaaccacttcatcatcaacaaacctatttgcctactagaacttttaaagcaaggctgcaaactattcaagtaaacaaccttgtggggtggttgacatggaccgagagctaacaagagaacactggaattagcttctcagtttcaaaatanggacctaaaggagtttgcgctataggagaagagttgcttgcattttgttttaatgggaaataaattttg

SEQ ID NO: 166 - DNA, 443 bp, Homo sapiens
  misc_feature (1)...(443): n=a,t,g or c
taaacgagatgtttttaagaagtgacaaaactacttctaagttcttcattttcctagttaggacaatattcacaggaaattgaaattattattctaacacttaaagtgaaatcactgaaactgttttcatttacctgaagattttaacaaacaggggcatgcaggacagagtacctcagcctctgtaaatgcctggaacaccccaactcccaaaggaaggcagagcaggtgcacatttccagagaggaattgcaaaggatgcccacagaaacaggtaattcattaccagagaaaagtccctgatgttggaaatctcatggctgaaggcagaaactcaatccgggtagaagctnagtcaagttaatccanatggaagcaacttaaattagcttttcttttaaaagagacacctagactgggtcccactcattacctgccatatt

SEQ ID NO: 167 - DNA, 423 bp, Homo sapiens
  misc_feature (1)...(423): n=a,t,g or c
ttgcaaaatcaaaaattttttattccaaatacaatattctttccaccacacctcggctgcaaggcattttgtagagaatctgtctggggagagggatgggtactggaggcacatccggggcaggtaggagacctggtggccaagactgggatggggtggcaccatgggggtatcgaggacgtgcatctgctccagctccatgtggcggtanancngcngcancngcnggggctncangctcnngaacnccntnaanttgttctcggcgaactctcgaactcgctgtgcacagtggtgggggtnnaaatcccagtaanggtcgctatngctctccccatcactngctgagataatgggtaatactcgtgcgttttngcgtttggtataaancccngtcataagggcaccangtctttctgatgg

SEQ ID NO: 168 - DNA, 436 bp, Homo sapiens
acactccaagcactcacaaatggctttcacaaacacttagcctaggctggaacacaaaaggatatcacaacagagtccattgggttttacttgcttacatcaccaaagaatgttcatggcagttaattttcaggctgtaaaaactacatctatggcaccaacatggaatttaaaaacaagttggatttcaaagtaccccaaatgccaaaaactgaaagtactatcaaacgggtctccaaagaagtctaggatgctgtgatgcaggcctgtccatatacctccctggaccctcaggtgctacctacaggcctctgctcatttcccataaacattacctcaccatcccaggacaacaaaggaatgccatgtaagaaacaaacaagactggttatctcctaccacaaacaggaatacagaaaacatggggccagattcg

SEQ ID NO: 169 - DNA, 461 bp, Homo sapiens
acaacagcatcaaatatccagggaactttatttttaaaccataaatcaaacagacacaactttcattgacccaaatatgcataatccaacctgaatataaaatgcactgaataggtaaattacatgatacaaagggaatgtaattttacaaatgtgaaatgattgatggctacagcaatttaacaaaataattaaaacattgtatgtttaaaaacaagaatatcttaaagccaattatctatagtaaaccaagggaaattctggtatggaatgatttgattcaaaggaaataaggcacctgctataaatttagagaatatctttcacttttaaagttatagtaaaatagaattagttaaccaagactggcttcagagggaaccaagttcagggattcacttacagggtgaaaagaaaatgatcaatcacaacctacgaagtcatacaaaggaagactagac

SEQ ID NO: 170 - DNA, 363 bp, Homo sapiens
aaatttaaaaagccaacctttattccactttgaacaagtttgtgaatgtccaaataaggctccttgaaaatttctccttcaggggtaagtatcttcacataaccttctttttccagaatgaagagacgttgcgagccatccccactatgcagggcaccaacgggctgccgcagcccacatcacaacctcctgaatacagaagcagttgtgtttgtgctttctgctgatctcttccactttgtcatattcttccatctggtccaagtagttagatgctggtcctctgacttgttttcttggaaaatctggaaagcacaacccaccatcttttcttgcatagtaaaagcaaaactcatccgcagt

SEQ ID NO: 171 - DNA, 428 bp, Homo sapiens
  misc_feature (1)...(428): n=a,t,g or c
taaaattaatcgtgaacacttttcttggtaaaaactcaaatacagaggataggcaggatgtctccctgcccccagttttacttcccgacccaaaggaaacctggtaactggctgtcatcctcccagaagtttttctatgcctttatttattaatgtacacttgtaaaacagcatttgggtttgctgttatactaatggcgttataacatacatacattgcagctcttttttcatttaactgagcctcagaaatcctttccatatatacatgtagatctaggccattctttttaaagctgagtaatgtttcatagtgtgggcataatacctacacttgtgtatttccagtaagcctttacagatactactaccntttttcctttaaaaattaaaaggtataatattaataaaaattccccgggaatttg

SEQ ID NO: 172 - DNA, 466 bp, Homo sapiens
attttttataacagctttattgaggtattattcacataccatgctttaaaaatatacaattcagtggttcttagtacattcacagagttgtgcaaacatcacatctaattccagaacattttgatcactcctcccaaactccataggcattgactttaatgtaatggcatatacatatatagaaatacatatagaaaccaattattctagcaccatttccattctttccccagggactgcaacatcatctgtcataaatcaacttttcatgtctgtgtgaatttggttttgatctccctattgagagactggtgtacagtatttgtctatccctgcacaaattattaaagcaagttttgccattctgttatccttcctcatgaatatcttgattacttttggccctaactcatcaagttccacagaaatcccaattggaatcctaggttaaaattggtggtggtca

SEQ ID NO: 173 - DNA, 406 bp, Homo sapiens
gtagcttgcgtattattttgagcatctttgtttattaccgctagaaggcaataactagtacaatgctttatatgtataatatatacttatatatgtgtgtgtattcctttaaatcagattctgattatctgaacatacttatttttaaaagacatccatagcacactctattctttatgtgtaaggataaacaatccaagcatactgtgaagatcctgtaacatatagctttatgactttggtttaattttctattccccagtccacattgcttgccggcgttctcctaccctgcatattctgataacaggagcaaagtgactggcattttcctccttctatggaaccaggggattcactagtgttttttctatataattcactggcagagctataataaaacaag

SEQ ID NO: 174 - DNA, 272 bp, Homo sapiens
tttttttttttaattagctgttcttgtcatatagttttattcctttatctttttttgaacattttatacacccttatttcaatgttccttttagatcactctattctctttactctctgggctttgaatctccttgtttcttgtatctgctgcctctctttgggatacctgggagtttttcctctgacctcgtcttcagtaggaaatgattttccatgagaatcctggttcccctggatgaggacggtgtctcctggggagaatgtcctgtt

SEQ ID NO: 175 - DNA, 196 bp, Homo sapiens
  misc_feature (1)...(196): n=a,t,g or c
caatagcagacttttaatcaatgccagagacaaagtgaggccgagctaagaacacgctcagctncgttacaatgaagaaatggtttcctttcgatgcaaagtataattgtaaaccacagtgctcgcacagttcacgnctgnttaaagngaaatcttagccatacatcacctaaaagtaattaaaaagtcaacacag

SEQ ID NO: 176 - DNA, 417 bp, Homo sapiens
ttttttttggcatggcttttttattctctttgcagccaagacctgtttttacaattaaaaccaaaattttgaatcacaaggttcctatgtctatgcatacttgggaacttagtgtgaggaaataatagttaattgaaatactagtggaactgttaaaccacaaatttagactaccaggagaaactgaattatttgatatattacatgtaatgatgcacgttatatattttacatatattacatatatatcttgttaggtgaaatgggcccacttgactcactgaactttattttttagacagagtctcgctctgtcgcccagattggagtgtggtggtgtgatcatagctcgctataacctcaaactcctgggctcaagcattcctcccaccaaagtcctgggattagaggcatgag

SEQ ID NO: 177 - DNA, 413 bp, Homo sapiens
ttcctatgctttttttctattttaggcacaatgctttaataaattacacaaagactacaaacctttattacatcaattgttacaaaaggctaagtggagaaagattacttatctgaagctgcacaaaatcagtgggcaatatggatttcatttaagcttgtcaattctcctggattaaattcttggcgctgtctcacatattcccaagtcctacatgtagaatgctaaaagttgcagttactaggttgggaaagccatgcccagacgcccctgtgaaaaacatatcaatatattaagttccttagcaaatcacatctagattaagttcataatgctttttttttttttaactttgcaaatctccaaacttttgctactttcttaataaaatacaacaaaatttttggcattcc

SEQ ID NO: 178 - DNA, 233 bp, Homo sapiens
aagcttgacctaagcatacacagaaaaaattaatatttttgttgttgttctagattctattattcaggcaggctttctatattttccccttaggtatctatactttagtatagatgctgtcactgtgagagactacagaaagcagggaaaatagaagttctatagcttcatctaccaaggaagatctagtttaaaacctagtaggggacatgtcccaacaacttgaaaattag

SEQ ID NO: 179 - DNA, 314 bp, Homo sapiens
tatatacgaattaaaatttatttcaaactgttttgtacatctttttaaaaaatgaaaattcaaaagtcttagaattaagaatgagtctttgatatcataaagctgtgtataacaataattaaagtagtggtaacattttacccttgtaaaaatgtcacagaattaaaatctcaacttggatcctcaatgattcaactggtttatcttacacaataagcgtttggtcagtttcaagataaaatttccccagacatgctgtccttaagtccttcctcctcaccatccatcagctcacacattggggtagctggctg

SEQ ID NO: 180 - DNA, 319 bp, Homo sapiens
tttttttttcactgtcaccatgaatttaaatttattgagtgccccacaaatgctagtctattctcagtacatttgatgaacaccatttctttatctctaaaggatgagagaatatttgctactatatattttttttgctcatcacccagccagaatacaaatggaactcctatgaatattctaaagcataatgaggaaggggctccaggctaaatgcaagtatccttgattaatgttttccccaccactgggaatcaccctcccccgctcccctgaagcttccccacaaggtgcggggggaagcaggagaaaaaaaagg

SEQ ID NO: 181 - DNA, 194 bp, Homo sapiens
tttttttttacaatgtgtttattggacacacaaaaaaactttgcaaccatcataatacatcaatatttaacctagataattctgaaataatttggattctttcatttttcaggatttgagctcatcaattatgttaaatttcctatattctgttacaaatataatacagatttcataagtctgccttgattcac

SEQ ID NO: 182 - DNA, 247 bp, Homo sapiens
ctagttttgtctttttggcaaataggagtccctcagaatctacacttgctctgaaatgtagaaaaattgattcaataaaggacggtggtgaaaccgtcctttgagatattttacttttcttcttaaagagcatacactttttaatgatcgtgtgtgtgtgtgtgtgtgtgtctgtgtgtgtgtgtgtgtaaaccctttaaaaagagattttggaaactgaattctgggaacgtttttttttttttcc

SEQ ID NO: 183 - DNA, 289 bp, Homo sapiens
  misc_feature (1)...(289): n=a,t,g or c
agaggttgataaatgcttttaatccccacattccacacacgggggacgctgtcattcacattttcatatttctgttctggtcgcagtctgtgtcctcaccaccctcatgaatgagggactttgatagatgcctgggtttgtgggctctgcggtactgggaaggagatacacaaagggtcctcggaggagggtgtggganagctttgaaggggacaaccactgcngacacctggaggggagctaaggggaanatcctgagactttaangagacattggaatggcttgggc

SEQ ID NO: 184 - DNA, 567 bp, Homo sapiens
  misc_feature (1)...(567): n=a,t,g or c
attaggagataagtttactgttcattctacaaagacacttaactcatggaacactgagtcactctaacccttgacttcattacacaaaatgaaacacttctgaagaaatacagaatttcttaactcacggcaggatcaaagaacaaaggctcctgctttggcatttcaaagttgaacagagttctcaataagaaggccacagtcaaatactaatggaatctcaactctaaattaaaatgactaatcattaaactgttcaacttagagtaataaaagatttctagatacagaccccgctggcctatagtcagtctgggaagggctagaaagaaccaacccatttgtgtggcttccgtatcttccttgcacaagcaatggaaacccagcagggaaagcagtggagctggcagagggcagggtgagaagacacccagtgaggactgacgggagaggagaggccagggcagcctcaggtacagctcatacctgnacttccttggcctcagaaagggttgctgtgattgnccatgggtccctaaaggccgccagaggcctttggtctggaaa

SEQ ID NO: 185 - DNA, 423 bp, Homo sapiens
  misc_feature (1)...(423): n=a,t,g or c
gtggacactgaagtctctgcttggttagtagtcatctaatagttgtacacggatttcctcaaacacttggaatcaataattcaaccagtctctgccaaggagctctgtgtgaatgctgaggcacactcaacactccgccatgcaattgacaactctgcattccctttacttatggcttgtgcaganctcaagatcagcttgaagtgagagcttaaggctttcttgggtttttcctgagcatctgcacagtcctgggcatggatggagtcctatttatgcatttggcagtctagattgccaataacactttggaagcttttcaaagtccctatgaaaatctctttttccagcttctccttttaggctttttatttagccaattgctttcccccaactgttatacattaaccccaggcagccaca

SEQ ID NO: 186 - DNA, 219 bp, Homo sapiens
  misc_feature (1)...(219): n=a,t,g or c
aattgataaactgagtttatattcacctattggaaacagtacaacatattttacatcaggttatgaaatatggatgttttactaaaagacaggaagagctttttccagtctttaaagtaaatacatattcaaagaatcttaaggcataccatttattcatattcatatctattgaaatactgtacatccacatacttcaataaatagttaaaaaccnga

SEQ ID NO: 187 - DNA, 477 bp, Homo sapiens
  misc_feature (1)...(477): n=a,t,g or c
gaccatatattctatttatttatcttatttattatccgtctctcccagctaggatgtaagcctcgtgaaggtggaggaggggggcttatttctgaatctccagcatctagattggtacctgccacacaaatatgtgctccataaacaaatgcactttttcttttctgcactccctgggttgcaggctgcatgcgaanacngtcctcaaggccagggatctgtctcaagcctttttgaaaaccacccctttcctacgtgccccacacccagctctagcagggtgccctcctgcccctgagcctgccctcatcatgcccattgccgaggcctcaggactgaatcacatttttggagtcttcccaggataagccaataggcatcattattctacagcgatgctcatgtataattataattattatcctatatgaacgatccattgctgctgtgtaattccaatggnaattactgggccta

SEQ ID NO: 188 - DNA, 501 bp, Homo sapiens
  misc_feature (1)...(501): n=a,t,g or c
ngaacggtctataagatccagatgtttatttcaaaacccaaacccttgttaccttgaagaatctttacatatttacgtaatacactgtacattatatgcatggcctgtttatactattttcaaaaagagaatattgttttaaactattaataaaccaaaattaattgatagggcagcatcaatctgtattccatccttggtccatggatttccttaaatgatggcatcatgttcatctatggttcgataccgaatgcctcttcttgagtaatacattttgcatccaatgtaaagaatagataaaactcccagcgttaatacaataccaccaacaaagctcccagtatcaaattttgatcctttctttgcttcagaatgcatagttgttgtgattgttactgatgaagcagcagatgtcactgaactattgtggggttacggtcattggtggatgttgatatctgagatgtgtnctgtgaaacacttggttggttttggggt

SEQ ID NO: 189 - DNA, 310 bp, Homo sapiens
tttttgaaggcttaagcaatcggggacgagctttattgaggcaatcacatccacatttcagttgtttgcaatgattggcaaacggatgagttaaaaaagccttctgcttccacactgttccgtctacattcagaaagcagtaaaaatatattcgtgcaatgaacactttccaccttaagcgtatcatgacagttcacaaatttgccaacagacaatgcaaaacaatatttacaagatagaccctttgtaagttccaaatttagatacttgtggtgtaattctaaaactaacatcgcatgtttttccaggt

SEQ ID NO: 190 - DNA, 447 bp, Homo sapiens
  misc_feature (1)...(447): n=a,t,g or c
ttcggttctcagtgttggaaagtaatatggtaaaacttctcttctccgaggacaatagaatagtatttgttgtatagactgaaccatcctccaaaatttggaagtcaggatcacttgaatgaattagatttgcagctgtaaagcactctttcaggttaactctaccaacaagtttctcggcatctagtttggagggaacatgtaatgtcacatttttgcaggcatcactggcaaatattaagatcgcgagggtcagcaggagcagccggcagagggctccgttccaggagccggacgggcggngctgcctccatggagagggctcggggcaggtcgcgggccgancgtcgggccgggggttaggagggctccgcggggcgagggccgcgncggaagcgcagtctgggcccgctgctcaggaggaacgcgaagcganggaggttgggg

SEQ ID NO: 191 - DNA, 441 bp, Homo sapiens
cattattataagctgaatttttattttactaaattatctatgtcaaaaaaattctgtgcctggcgtggaatttcactccatcaagtgttacaatgattttttcattttcattacaagcaggagaatgaatgtaggacaagtgttaggaaacatggcaataaattagaatataatttacaaaagcaaaaaaattaacagtgtaccacattattactgagtataaaataataagcaacaactaatcacaataatacaaaggtaatttcgttctgtgttactgaggatacctatgtgacattcattcaaacaaaaaagttcctaatgaaatggactatttgggaaatcatatgtatctcacggggtttaatcattagggtacatttaccgttccctttttagtaggactttatcccagtggcagatactgctcccaggtgtaag

SEQ ID NO: 192 - DNA, 343 bp, Homo sapiens
  misc_feature (1)...(343): n=a,t,g or c
gcatttatnantantttttatttttgcacaggaaaaactagtgagacaagattcaaacagtctctctctgtgaatcatctgtcagtggtgatgatcacgttaagtttcagaagtgtagtacatgatactcttaacaatttgtctaaagcaatgtttctcaaccaggggcaattttgctcctaaggggacatttaacaatggagacattcttgggttatcataactgggtgaagaaggcaagggtatgtcattgggcatctaggtgaggttgagggctaggggtactgcctaaagntccctaccaatggcacagggntaccccccnttctggtncccancacat

SEQ ID NO: 193 - DNA, 409 bp, Homo sapiens
  misc_feature (1)...(409): n=a,t,g or c
cctggcattatctttttttcctcctacagtttcttttacagagtcttccgtggctataggtcggaacagttttcctgttgctatgagaacggcataaataagtcaagtttaaaattcactttgggggtatggagccgccacagttccggctacctaagccctcctgggtgtgtgttgcgtactcttccctataggcagtggatcacagccatttaacatggccttcctccaccatggcccatcttctggncagaaaaatnccacaagcctngcagagngccctctaactgcttgggcttctacacacagacctagtaatggtcttctgtgctgcaaggagagnaatatnaagctcaacatttaacatttctccaagtncagaaattcatgggcctcccaaactccacca

SEQ ID NO: 194 - DNA, 395 bp, Homo sapiens
  misc_feature (1)...(395): n=a,t,g or c
gtgttccaataaaactttatttacacacattgaaacctgaatttcatacaattttcacgttaccaaattttaattttttttcaactatttaaaaatgttaaaaccattcttagctcacaggctatgcgaaanagancaaccagccagattcggcccacggtttaaggccagtttaagcctcaccaccttcctagccccactcacctattttgtcctctcatcttcctgtccttcagcacccccatgaccttcctgtgaccttcaatggcccctccagctgccgtccagccctgtctgtctgcccttnggggaccctctcctcctgggctgcaggactgttttttcctggagcaggtctctaaatagctccattcgccttggcagggggaatccag

SEQ ID NO: 195 - DNA, 482 bp, Homo sapiens
  misc_feature (1)...(482): n=a,t,g or c
tttttttttttttgagttttgagggcttttaaataatgtgtgtgtgtgcctctgtgtgtgtgtgtgtgtatttttttctagatactagtcctttgttggatgtgtgatttgcaaatatttcctcccagtcagtagcatgtcttttcatttctcttttctgggcctttcacagagcagaagtgtttaattttgatgaagtccactctatccatttttctttttatggatcatgcttctggtatcaagaactttgcctctctccttagatcccccaaattttctcttttatgttgttttctaaaagtattatagtttacgttttacttttaagtctatattccattttcagttaattttgtataaaatgtgagacttaggtctgggttcatttttnttgttgttgcccatggatattcaattactcccaacatgatatttggtcgaaaaggcncttttttggccaatgaattggtttttngcac

SEQ ID NO: 196 - DNA, 397 bp, Homo sapiens
  misc_feature (1)...(397): n=a,t,g or c
tctggcgggctaacgctttatttnccagccaaggccccgggccgcctgngtttctgctcagaagatcctcacggagtccagctgcacgtccccgcccacctccaccaggcgcacgcngcatgcggcatggcggtggcggaagtggtggtactgggcgtccccaaccacggccttgaagccgtcgtctgacgcgatgatgagcacctcgaagggctgcccgcgctggaaaggaacgcccggcccgcgctcctcgcggccccaaggaagccttgctcctttgctgttgaagaccacctccgacgtgtccagccgggggttgaaatgcagcgcggcatcggagccctgctccttccccgcacagcaggttttacaatggaaccttgcttnggcatttggg

SEQ ID NO: 197 - DNA, 513 bp, Homo sapiens
  misc_feature (1)...(513): n=a,t,g or c
ttttttttgaaagccgtaacatttattgaagagcggacatatgtttgcaaatcacagtgtgcatgggcatgcattacatggttcataatgctattccaattaggcttttcatagtgccttctcataacgtcctttaaaaaaaataataactgaaagggaaaagaaagtgtcaattgcaattacatttacaaaaccaaactgctgctttcaattagagtgaatctgtgcttcgctactcagatatacacatgtagattttccaaggcccatgcacacacttctgtaggggcagaaattttctatgaataatggctttagcaacccgaatagtatctctaaacattgacaagcttggggaacagggcaacaagtgcaatgaacaatacaatttctaacgtttgtcccagtcaacataccactttgccctggagatatttaacacagcatttcatttttggaatgataagggntaattcntccaatttanggggattatacngaatataccnataa

SEQ ID NO: 198 - DNA, 224 bp, Homo sapiens
gctattaatttcatgtttatttcatacagggtttttgtcaagtttatcagttttaaaatgattaagtcataatcaccattcaaagacaaattttcctctcaaaataataatttccattctgctacctacagtttggcttatcctttggtctgatagccatacttcatctcacgaggactatacaagtatgtactatgtacaaaacattttcaagtttgctttca

SEQ ID NO: 199 - DNA, 448 bp, Homo sapiens
ttttttttttttattgtgaacacaattttctttatttcatttttggagttttctgaacagaaaaatacaattgattttctgtatattgatctagcctgtgaccttgctgaacttgattaattctattacactatgattttttgttgtggttagacccttacacaatcaaatgaggttaaaaaaaaattgtcagagtggccccagaccaacaacaggatgacagtagcctttgcccatacagagataaaatttagtttttgcagtcctttcccatagagattgtatggcagtagcaattctatggcctactgccatacaacctgaactgaagtccagaaagtttaggtgactgggccacagagctaattactggtggagccaagaagagaaattatatccctacctccttgcccactaagctccccattccagtgggctgctttctggt

SEQ ID NO: 200 - DNA, 378 bp, Homo sapiens
gtccaaaaaatatgtagtgtcaagttcaccactcaaattctaaagatgtcagttgtctaagggacaaaaaagttgccccaaaaagtcctagggaagcttatgggtacacttaccttgctggagaatggtgccatctgcattaactggttgatagacgatggtctgcccttcagcagtctgtgcacttgctgtccctggacagaattcgtgctgcatgtgtctggtctggccagcagtgacagccgtctggggctgctggatgatgatctgctgggtctggcctgctggcctgcacctgcacagcctgtccaccctggatctggatctgtccaggtgggaccaactggtatttgctgcaaaccctgtgttccagaaaca

SEQ ID NO: 201 - DNA, 403 bp, Homo sapiens
caagtgaaaataaaaatttattccaagttcaaagtcatagagaggaactgaagtcatcaggtgcaggactggggtcaggaaagggcaaggactttgtgtggctttatatgaaggaacgagtttaacatgaggaaggaaccatgaaccagagataaagaaagcctgtgcagaaagttaaaggatccttttcctgtttcttagctgacaaagactttcttcagctagccataaggcaactgtcaaatatcatcacatttatcttgaaggataaaatttgtgcaagctcaattgaacagcaagaactagatgcaaggaagaagtcagccaggatgactgtggggctgggtcatttctcagcttgttagagactgagcccagagatagtctttagtccagactgtta

SEQ ID NO: 202 - DNA, 393 bp, Homo sapiens
ttttagaagtgacatattgttatattttcaccataggtttgctttaagaaatagtgctcccttcagaatggaagaatttatctgcctcttatttgatgtggatcagagctaagatggctgactaaataaacatgggggactggaatctccttggagatactctggaggaagttcacatccactccaccatgattggaaagatctggctcaccatcctgttcatatttcgaatgcttgttctgggtgtagcagctgaagatgtctggaatgatgagcagtctggcttcatctcctgcaaagaaacctaattgctacgggggccggaagaggaataggtgcggctccgacagccagaggggcgggcatacgcagcctccctcggctcagcctgct

SEQ ID NO: 203 - DNA, 395 bp, Homo sapiens
taaaaactggctttaatggacattaacaaataatatacactgatttatcacctttaagcaacaaaaacatgacttgtaattattcaaataaggtaggatttttctcttaagtacacttcttaaaagtcattcacaagacaactgggcatccactaagaccaaggcactgtgggggaggcaaacagcacaacatcctcacctcaaggagctcagcctgggatgaagacagacacacacaactccagcatgaggccaaggggtagcctgttatgggatcaagtggtggcagaatcaagaagtggttctgaaagtgttctttagtcacagagaccagtaggtttgaaacccagtgatgttactttttaactttgtgccttacctactataagcctcag

SEQ ID NO: 204 - DNA, 115 bp, Homo sapiens
tttaattgagacaaggtctcagtatattactaaggttggtctcgaactcttgcgctcaaggatactcctgtctccacctcccaaagtgctgggactacatcacagctcacttgaa

SEQ ID NO: 205 - DNA, 411 bp, Homo sapiens
ttttgaatttacaaatgtatctttatttattttgtcttgaacttcacgtcaatacagattctgcattgctcaactaatgaatgcaggaaggactgcatgaggccagcacggcacgtcctcacaccagcagttcttcttggtctgagtcctttcctggctgcagcagagagaacagagaaagcgcaacactgtgttcatggtgctattgtaattaatgtattataattattttgtatcttctgttagatcttctgccttgattcccagtgtccaaatacaaaagtattgactactgtccctgatgtgaagagcaggatctattgaagccgaacacatcatctttcagttccaggtaggagtgcagtaagaagagttttcttacaggcatgatcgctgtgatggataagtgtg

SEQ ID NO: 206 - DNA, 414 bp, Homo sapiens
aaagagcttctaacagcttctgtccatttattggttggatgacaaatgaaaaagtttctttggccttgacaatctccatcaaagaaaccaaataagcatgttaaggaaacatacagtatatgaacagttaattcttgtattgcttggacatcaataaatctaataaaaacgaccaagaatagtcactcagttttacaatatagaaggcagagaaaactctgacactccaagttgtgaagacaatgaaacattccagtactccattagaggactttttgtatctacagctgcctgtgctttgaaggtaaaaacccagaatttaaattcaaacatattcagttaatgcacttatgcattttacaaatttttgttctggtatagcatatgaaagggagctatatctgcccccatttc

SEQ ID NO: 207 - DNA, 382 bp, Homo sapiens
tttatattttaacacatctttattctcacagtgctagtcaacaacattgttcacaatcacaatcctctgagtggcaccccaaaattgagaaaggcagagaaatgaataattcaataatgctgaaagtcatcaatgtaatcaaaattcccaagaacaggacagtaacagccttacactgactattttggtgagaataaccacaaatgtagttttgatctaggatgaaaccaaatgtgaggagaatgattccagctattgctcccagggcactaagaaaattcattattcggctcaatattatcagagtttctgtggtttttcttttcactgcaattaggagggctccagaattaatgaacaaaacagagccccagaatggata

SEQ ID NO: 208 - DNA, 252 bp, Homo sapiens
tttacttccatggattttaatgttctaagctaagtaagaatctcttcaataaagtgagaattaaaaggagaatggagctaggagttgagagaggcaacaaataatgagagagcagaaagcaaatccacaaaaaactgtcacatgacagaggccagaatggagctgatgcagctgcgtcatttcctacagacctagttgaccatgtggagaagaggcttgaacaaatggggacgttctccaaccttccaaatc

SEQ ID NO: 209 - DNA, 429 bp, Homo sapiens
  misc_feature (1)...(429): n=a,t,g or c
ttttttagtgtcagtagaaggtagctgttatttattgttctattctggggtaaaggtatcagattctcaaagggattcttaatctagaaagtttgcgaagagatggcaaaggtgtttgaaagctatcaggaaaccatcctcgcgtaaaacgaagcagcgctacagaagtgggctgccatgggaatcgggaggcccaggttccactgctaacttgctgcagcttactgggtgattgtctctcgcgagaagacgggccgcgccggcgatacggattccgagcgagtggtggtggtagtggtggtggtggcggccgagacgcggcggccatatttggtgaggcctcgggagcggcagacnnggttcagctgggagtagcgtctgccctttttcccacccaccgtccgcatctgtgtgctgcgcgaagaggca

SEQ ID NO: 210 - DNA, 412 bp, Homo sapiens
tttggtagaaattggcaagctaattctaaaattaaatgaaatgcaaaggaccaggaaaagccaagagactcttggagaagcaacacagtggaagactttcactatcagatagcaagaccttcaagttatgagaatgaagagagtgacttaaagacttacaaagagaccaacaggacaaaaaagaaagtccagaaacatatccacacatgaatctttgacttatgacaaaattggctctgtagagtagctggaaagggaaagtcttttaaataaattgttctggattaatttgatatccatctggggaaaaaaaaaaacaaaaaacaatattgacctctacctcatgtcatacctaaaaatcaattccaggtggactgtagatttaaatgtaaaaggtaaaataataaaactc

SEQ ID NO: 211 - DNA, 234 bp, Homo sapiens
tttttttttttttttttttttttttatttactcagtgaatttattgtaaaaataaagaaactcaattattccagttaatggatttcacgttaaatagtttaactttcaatgggctttctgaagagctgttcataggatgatatttggaagagtcctttccttaaggaaaaaaagggtgaacaataaataaagagttacttgcgttaacggtcacgttatttcattaaaagagag

SEQ ID NO: 212 - DNA, 353 bp, Homo sapiens
tttcttcattttcctagcaactaaaacgaacaaaaagaagtactgaaatgcaggactgacaacttaaaataattccatttttgtttctagtttttttcctgaacgttaaagacttaaacgataatcactgcacatagaaactaagtatttttgtcttaattgaaaattagttattaactcataaaaagatataaaatattcttcaaagttaaagccctaaatttaaattggtttatgtaagaaatccgttgacactgatgaattaccctcactaaggctgggaggaggagaataatcttccatgtcagaatctgacggacttcggtttcgataacgaccaccacctgaactcc

SEQ ID NO: 213 - DNA, 341 bp, Homo sapiens
aggcaatcctccctccttggcctcccaaagtgttgggatttcaggtgtgagccactctacctggctgagacttgctctcatttttaaattcaaaaaatgttttccatagatcggccgcctgtggaaaaaggtgactcaggcctgtaatcccagcactttgggaggcctaggtgggtggatcacctgaggtcaggagttcaagaccagcctggccaacacggtgaaactccgcctctactaaaaatagaacaattatctgggcatggtggcaaatgcctgtgatcccagctattccggagactgaggcaggagaatcactttagcccatgagacaggggatg

SEQ ID NO: 214 - DNA, 351 bp, Homo sapiens
caggttcaagttgaacagctcctctttaatcaaagggagaacacagatgtatcaaacagagtaggaaagaaatgtatcaaaagacagtaggaaagaaagcctttccttcttgaaaggctgaggttgagagggaaagctaatttatcactacaactctatggtagctttccatgctaaattttccctgcctcttttgtgattttttgatatggaagagtaggggttatatcttctctgtaacaattaggccatatttccttataccaagtagaggtgctcaaacactgtagtggtattaaagggctgaggagagtaactgaagactggcatacagaactccacctggaggac

SEQ ID NO: 215 - DNA, 417 bp, Homo sapiens
ttttaatgttgaagactccactcagtcatttgagctccaggaagccttccctggccacccataagttaagagaaaagcccctcttctgagctcccagagcacccacttcatacctatgctatagaacacaccgccaaggacggaaattatccaaaggtttgtgtccattgattgccatgccaggcatccagctctgctgaagcacgcaggggccctgacttcctcattaggtattctcaacacctccaccagcagctggtaggcagcagagctattgttactgagctgcccacggaccaatggatctatgaatgaacctgaacgtcttccctggagaaaagcacttgcttgtcaagggaggaacaggggtctgaaatgctaacccctgccctatagtatgggtgtgcatacggtgca

SEQ ID NO: 216 - DNA, 454 bp, Homo sapiens
tttatttttatttttgaacaatgagaacacatggacacaggaaggggaacatcacactctggggactgttgtggggtctttagaggggggagggatagcattaggagatatacctaatgttaaatgacgagttaatgggtgcagcacaccaacatggcacacgtatacatatgtaacacacctgcacgttgtcgacatgtaccctaaaacttaaagtataaaaaaaaaaagtcaggaaacaacaggtgctggagaggatgtggaaaaataggaacacttttacactgttggtgggactgtaaattagtttaagtattgtggaagtcagtgtggcgattcctcagggatctggaactagaaataccatttgacctagccatcctattactgggtatatacccaaaggattataaatcatgctgctataaagacatgcacacgtatgtttattgtg

SEQ ID NO: 217 - DNA, 387 bp, Homo sapiens
  misc_feature (1)...(387): n=a,t,g or c
gatccagcttattcttttattttcaagtccattcttggggctggtggggaggcaggagaatacccctccctaagcccttagtgtgtgccgagcttgctttntgatgttggcaggggaggggagacctgggtggtgnctgagttccctttatcaaacccttcaatgggcacaaaattgagtgcttnnttnntaggttttatttnnnnatgaatgtccaaatctgtgtttccccctgccanaacagactgtgtggccagttgaaagtgtcttggtttgtggttcatctctccctcattttcttggaggcagggcctgaganccctgncanaatctcctatggttntgaatccacggcttctttttggacattaaaggttgatttgatgc

SEQ ID NO: 218 - DNA, 481 bp, Homo sapiens
  misc_feature (1)...(481): n=a,t,g or c
ctcgagactgaatcttgctctgtcgcctaggctagagggcagtggcgcaatctcagctcactgcaacctctgcctcctgggttcaagcgattctcgtgcttcanccacctgagtacctggtattacaggtggctgccaccatgcctggctaattctgtattttttatagagacaggtatctcattatgctgcccaggctggtcctgaacttctgagctcaagcaattcactcaccttggcctccccaaagtgctgggattacaggtgtgagccactgcacctggttgagacactactttcacacacttttacatttcacacttctatgaagacagggtctgcaatctggcaatgtctatgatttagtgggaggtagaaggaggcccagggacagaaacataaactttccatgtcaggatgttggctgtgacaagcatgcccaagactttggacatgatttttctgttctagatctgtttcc

SEQ ID NO: 219 - DNA, 478 bp, Homo sapiens
catggattcactctattgcccaggctggagggcagtggtgtggtcttggttcactgcaacctccatttcccaggctcaagcaattctcgtgcctcagcctcccaggtagttgggattacagtcatgtactaccatgcccggctaattttttaatttcctgtagaggtgggtgtttgtcatgttggctaggctggtcttgaactcctggcctcaagtaatctgcccatcttgacctcccagagtgctaggattacaggtgtaagccattgtgcccggcctccatgattttagaaacaccgtttttctttacttaattttttcttaattagaaatgggcccagacatccaacaagcaattattacttaatttaaaaatttcaggattttaaaatatatgaaaactctatttacaagcatttatttttaatttattggagatggagtctactctgtcacccaggctggagtgcagtggagt

SEQ ID NO: 220 - DNA, 623 bp, Homo sapiens
  misc_feature (1)...(623): n=a,t,g or c
ccattgtcaagaaatttaatatggcaccaggagatttgcataattgacctatttggctttctgcatcaagtttggtgtcctgttgcagaagctgagcattgacgggacagaggcataaactgcagcgcttgataaaatagagcccagtattctgaggttagtgaagaaaacacaaagacttgacagatgcactcccagatcgcatctcacagtcattcaaggtttagggcaaagcatttncatgtggagnngnaccttnaccttntcccgnccagtcatgcatcttggaagttccttggctaagtctgcagggaaggagaagcagcaggcttgatttgcatcaataaaagcagcgatctgtgctggccatgctaaccctgttggctattagggggtgggggcactctgtcaaggggagtcactgggacggtgtaggattcagccttcagagcctgctggcctgaccgtagaaggaggaacctgcacacaccctgctggttttagttcacgagcagctatcaaagcctgttagccatcctggttacctgcttgtgccaganagaacttactgtcccaggtaagcncctaattttttaagtcttagttcctgtcaaaggccactt

SEQ ID NO: 221 - DNA, 457 bp, Homo sapiens
  misc_feature (1)...(457): n=a,t,g or c
ttttttgtgtgaaaagccttcattgtgcaagcgtgcccancaaacaaacaccaggtctgcgctggccgaagacgaagcgtcctccctggagtcgggaacaagtcacctctgaccacacctcctctgacgccatcacctcctcctggccccacccaagggctcgacacaagccccaaggtcggggggagaggggcggggcggaaccgagggcggaggcaaggtgggattccaggaaggccttccgaagatgggacggtgggtcctgtccctccaggtagcttgtgggtgtggacagcaggacttgctggctcagtgtgggcacaaggacactgtgccactggttgagtgagtggtgagggattggaggtggctcccagaggactccatcttgcatggccctggccttgtggcttccagnaggcttgccctggctgtgggtaagccangagcanatgcg

SEQ ID NO: 222 - DNA, 325 bp, Homo sapiens
  misc_feature (1)...(325): n=a,t,g or c
ttttttttttttttttttttttttaatgttaaaaatatttattttttttccnaaaagatcacacaaaagttgggaagagaaggatgtcaattagactacatcaaaatctgggcagagggaggacaaagagctgcctaaagaaactggtagctggagcaaactgcagagntcaagatgaccctagtccacggaaccagcagcccaggncagccacnttcaggngcaccacccgnggcacggcagggagagcaaagttgctggccccantcattcctccttttcagggcaggagaggcagaagctcactntttagacatgttcttga

SEQ ID NO: 223 - DNA, 355 bp, Homo sapiens
  misc_feature (1)...(355): n=a,t,g or c
acagtaatgganttnaaaccaaagtgatagttctttattatagcaaagtgatagtttttttatttaaaataagttattttttacaacctccttatataaaagatgtttatgaaagaaaaaattgagtgtgtctcggtgccatttttttaatgcaatgaatgatatccatgaaaaaggaacatctgaatcttttgttttaaaagacagtgcagggtataggtggaatttatgggnggatacatcccggataaatttgccataatggaaatgagggagaggtggtataataatttttttctactgttatcccntctagggccctgacttgctcngcatgggggcccaagggggnggt

SEQ ID NO: 224 - DNA, 433 bp, Homo sapiens
  misc_feature (1)...(433): n=a,t,g or c
aaanaggaggaaaaaaaagtagatgactccctcaggttaaagagttgtgctattcaacaaataaacttcctcttccgtttcttctctctcctcatctgtgagattcagttgaacattattgaagcggggtcttggtttgccgtctgggccatatgccggagatatctttttttgttataatgccaaggaggcgcccattgtgagttacaaggcactgcctcagtcccagctttcggaaaatatccaccacgatctccattggggtgtgggtctgtcactgtaaaaggggctcatgtcaaggaatgcttcgaagcttcaatgggccgagggactttctgctggggaagagatggggggtntgctgtgcaaaacacaccccgaggaactgcccacgntaccntcttggtttttcccggggattttctntttgcaa

SEQ ID NO: 225 - DNA, 189 bp, Homo sapiens
gacgcttgtcaacattttttaatcacagcagcaaagacaaaggagcgatggcacagcaggttctctgaccaaccctggaaatacttcatgtttctaaatgtgcttcctgatttttccagagtcataaagctgatgtgtgtgtggtgttggctgttttcttcacagtctcatgccagacacacaacataa

SEQ ID NO: 226 - DNA, 222 bp, Homo sapiens
  misc_feature (1)...(222): n=a,t,g or c
gacacttaacacagggctttaatgnaacaccatttagnaacaggacaaattgaaaagtgaggggtactttgtggttaagaaaatgggggaccacatctgttggagagtgggcatttgacaacaatgggccaggtaccccgcatgtaaaatcaaaatntaagggtctttttaagggctggaaaagttgctgctggggcattgcagttaatgggtcagacattt

SEQ ID NO: 227 - DNA, 570 bp, Homo sapiens
  misc_feature (1)...(570): n=a,t,g or c
tcttttttcagatgtgcaggtntttatttcctctccctcactctgctcnaacacccagcataaggcactacccccagatgggagggaagggagggcnactgtgaactcaagtntgagggggtcatctgcannaagaccggagttgcttccatgtcactctcctctcaagagaagctgctatttcagggtaaatggagtctgctctcatccatggttaaaagtggattgagacgntctacagaganttccatcttctttttaaggaacacatccgaacganttcagaagggaaattttgatatttaaaantcagtgtctctcacttcccactccatccnccacctccctttntaagctcagagcacagcgttcctacggtccagccagggaatctttccagaaaggggnttgagagtttcgggcccctgatgggagcggctcatttgctggccgtgaacgctgggtttcccgtgatagctctcccaaggttcagggcgtgattgtcatgtgtaccttcgaggnttttnacggnctcagggtcatggcgtncggttcacgtgatattcgtag

SEQ ID NO: 228 - DNA, 179 bp, Homo sapiens
  misc_feature (1)...(179): n=a,t,g or c
ataagcctaaagaacacaagtagctaaagtatgggtatatatgctaatcatagagagaaaagcaataacaataggaaatgtggtcctgaaaataggcttgtgaagataaatctacttcattctacccaaaccctttaagatacacattcattngtaagaatttaccaagcatctgccat

SEQ ID NO: 229 - DNA, 388 bp, Homo sapiens
accaccaaaatgccagaatttattcaccaagtgagcatcgggtaacatccatggatgagagtttaaacatctcttggttgctatggagggtccaagaagaaaacaaaatccattagtataaaggtttgtatttgctgtgacctctattgtcttgagagacagagtagacagaagaaataacaaatgtgaagtcctggaatatagatgagcttgtgatgaaagacggaacagagtgaacggtcagagctgttggaggaagaaagcaggaagggcaataaaggtccaagtggtagccagagcctcggtttattctagatgagaagggagatggtggagtcttttaagcaggagagaaacatgttctgagttacattttttaaaaatgtaa

SEQ ID NO: 230 - DNA, 250 bp, Homo sapiens
  misc_feature (1)...(250): n=a,t,g or c
gtgatcagtctcaagaatattccattatattccattgcctgcctcccccaacttgtgctgatattttaaggatgtgctcaagagtatgaagcagggtgcttttgtccctttctctcctccctagtaattccctcctccctatcccatagccaagtagccacccctcaaatnagccattcctttttgctttcatcaatggtctctgtgaagttggggtcgttgttcatgatggcggcgtccgcgctctctg

SEQ ID NO: 231 - DNA, 3041 bp, Homo sapiens
gaaaaagagaggaagagaaaccatttagagactgtgcagatgtatatcaagctggttttaataaaagtggaatctacactatttatattaataatatgccagaacccaaaaaggtgttttgcaatatggatgtcaatgggggaggttggactgtaatacaacatcgtgaagatggaagtctagatttccaaagaggctggaaggaatataaaatgggttttggaaatccctccggtgaatattggctggggaatgagtttatttttgccattaccagtcagaggcagtacatgctaagaattgagttaatggactgggaagggaaccgagcctattcacagtatgacagattccacataggaaatgaaaagcaaaactataggttgtatttaaaaggtcacactgggacagcaggaaaacagagcagcctgatcttacacggtgctgatttcagcactaaagatgctgataatgacaactgtatgtgcaaatgtgccctcatgttaacaggaggatggtggtttgatgcttgtggcccctccaatctaaatggaatgttctatactgcgggacaaaaccatggaaaactgaatgggataaagtggcactacttcaaagggcccagttactccttacgttccacaactatgatgattcgacctttagatttttgaaagcgcaatgtcagaagcgattatgaaagcaacaaagaaatccggagaagctgccaggtgagaaactgtttgaaaacttcagaagcaaacaatattgtctcccttccagcaataagtggtagttatgtgaagtcaccaaggttcttgaccgtgaatctggagccgtttgagttcacaagagtctctacttggggtgacagtgctcacgtggctcgactatagaaaactccactgactgtcgggctttaaaaagggaagaaactgctgagcttgctgtgcttcaaactactactggaccttattttggaactatggtagccagatgataaatatggttaatttcatgtaaaacagaaaaaaagagtgaaaaagagaatatacatgaagaatagaaacaagcctgccataatcctttggaaaagatgtattataccagtgaaaaggcgttatatctatgcaaacctactaacaaattatactgttgcacaattttgataaaaatttagaacagcattgtcctctgagttggttaaatgttaatggatttcagaagcctaattccagtatcatacttactagttgatttctgcttacccatcttcaaatgaaaattccatttttgtaagccataatgaactgtagtacatggacaataagtgtgtggtagaaacaaactccattactctgatttttgatacagttttcagaaaaagaaatgaacataatcaagtaaggatgtatgtggtgaaaacttaccacccccatactatggttttcatttactctaaaaactgattgaatgatatataaatatatttatagcctgagtaaagttaaaagaatgtaaaatatatcatcaagttcttaaaataatatacatgcatttaatatttcctttgatattatacaggaaagcaatattttggagtatgttaagttgaagtaaaaccaagtactctggagcagttcattttacagtatctacttgcatgtgtatacatacatgtaacttcattattttaaaaatatttttagaactccaatactcaccctgttatgtcttgctaatttaaattttgctaattaactgaaacatgcttaccagattcacactgttccagtgtctataaaagaaacactttgaagtctataaaaaataaaataattataaatatcattgtacatagcatgtttatatctgcaaaaaacctaatagctaattaatctggaatatgcaacattgtccttaattgatgcaaataacacaaatgctcaaagaaatctactatatcccttaatgaaatacatcattcttcatatatttctccttcagtccattcccttaggcaatttttaatttttaaaaattattatcaggggagaaaaattggcaaaactattatatgtaagggatatatatatacaaaaagaaaattaatcatagtcacctgactaagaaattctgactgctagttgccataaataactcaatggaaatattcctatgggataatgtattttaagtgaatttttggggtgcttgaagttactgcattattttatcaagaagtcttctctgcctgtaagtgtccaaggttatgacagtaaacagtttttattaaaacatgagtcactatgggatgagaaaattgaaataaagctactgggcctcctctcataaaagagacagttgttggcaaggtagcaataccagtttcaaacttggtgacttgatccactatgccttaatggtttcctccatttgagaaaataaagctattcacattgttaagaaaaatactttttaaagtttaccatcaagtcttttttatatttatgtgtctgtattctacccctttttgccttacaagtgatatttgcaggtattataccatttttctattcttggtggcttcttcatagcaggtaagcctctccttctaaaaacttctcaactgttttcatttaagggaaagaaaatgagtattttgtccttttgtgttcctacagacactttcttaaaccagtttttggataaagaatactatttccaaactcatattacaaaaacaaaataaaataataaaaaaagaaagcatgatatttactgttttgttgtctgggtttgagaaatgaaatattgtttccaattatttataataaatcagtataaaatgttttatgattgttatgtgtattatgtaatacgtacatgtttatggcaatttaacatgtgtattcttttcatttaattgtttcagaataggataattaggtattcgaattttgtctttaaaattcatgtggtttctatgcaaagttcttcatatcatcacaacattatttgatttaaataaaattgaaagt

SEQ ID NO: 232 - DNA, 1311 bp, Homo sapiens
acctcctgtggccagggcttctatgggctgtggcttatgtctcatgtgtcattctccagggaagcgccgccgagctgctatggacttccctggagccaaggtcattgttccccagctgaagggcagggtgcagcggaggcgtgtggggttgatgtgtgagggggcccccatgcgggcacacagtcccatcctgaacatggagggtaccaagattggtaggtggaccagggaagctgggaaacccttgtctcttcccaggagggtgggggcactggcagggtggtgctgatgcgtggcttatgcttgcttgacaggtactgtgactagtggctgcccctccccctctctgaagaagaatgtggcgatgggttatgtgccctgcgagtacagtcgtccagggacaatgctgctggtagaggtgcggcggaagcagcagatggctgtagtcagcaagatgccctttgtgcccacaaactactataccctcaagtgaagctggctcagggtggggctgtcccttccaggagttttgcccctacaaggggttagtcaagaagctgaggcagaactcactgggggtgggcagttaaggtggaggctgattctaattgtctggttgaggggccacaccacctattccccccacctaactcatgccattccagcttccttcaggaccctgcttctgagtgacggaccagctcacacaatgtcttgtttcagtccatgatcccactgacctactcttgcctgctggagggtaatgagaagctttggttctgccatctctcccactctgccaggtgctggctgtggagcaaaggctcacctttgtggagaggataaaacctkcccaacctacctcaccatggtttttcacattgcaaagggtaataacatgggcagtgcggacttaggctaccccctccagtttgctttccgtaaatgcaaattgtccttactgcaagtcaggaatgattgctgactcacagtagggctgctatgcctgtgtgtaaacttggggatggctgagggaacatagactcactcttccacattcccaagttggtctagtgtgctgcccagtagcaaaccatggcagactcaccacctattctgagttccagggctgctgtagggcagggtgggcttcctcccagacttgccttaccctgggctgatctttgcccctggtatgcattaatggactccactgaatcctgaaaaaaaaattaaacttccttcttacttgccagtctctagcttcattgttctctgttcacagggttcctgaaatgccaacccaatgcc

SEQ ID NO: 233 - DNA, 1206 bp, Homo sapiens
gttgctgtcggggagttgaaacctaattttgtggcgtagagctatgcagcttgaaatccaagtagcactaaattttattatttcgtatttgtacaataagcttcccaggagacgtgtcaacatttttggtgaagaacttgaaagacttcttaagaagaaatatgaagggcactggtatcctgaaaagccatacaaaggatcggggtttagatgtatacacataggggagaaagtggacccagtgattgaacaagcatccaaagagagtggtttggacattgatgatgttcgtggcaatctgccacaggatcttagtgtttggatcgacccatttgaggtttcttaccaaattggtgaaaagggaccagtgaaggtgctttacgtggatgataataatgaaaatggatgtgagttggataaggagatcaaaaacagctttaacccagaggcccaggtttttatgcccataagtgacccagcctcatcagtgtccagctctccatcgcctccttttggtcactctgctgctgtaagccctaccttcatgccccggtccactcagcctttaacctttaccactgccacttttgctgccaccaagttcggctctaccaaaatgaagaatagtggccgtagcaacaaggttgcacgtacttctcccatcaacctcggcttgaatgtgaatgacctcttgaagcagaaagccatctcttcctcaatgcactctctgtatgggcttggcttgggtagccagcagcagccacagcaacagcagcagccagcccagccgccaccgccaccaccaccaccacagcagcaacaacagcagaaaacctctgctctttctcctaatgccaaggaatttatttttcctaatatgcagggtcaaggtagtagtaccaatggaatgttcccaggtgacagcccccttaacctcagtcctctccagtacagtaatgcctttgatgtgtttgcagcctatggaggcctcaatgagaagtcttttgtagatggcttgaattttagcttaaataacatgcagtattctaaccagcaattccagcctgttatggctaactaaaaaaaagaaaatgtatcgtacaagttaaaatgcacgggcccaagggggattttttttttcacctccttgagaatttttttttttttaagcttatagtaaggatacattcaagcttgggttaaaaa

SEQ ID NO: 234 - DNA, 3058 bp, Homo sapiens
gccccacagtgagaggaaggaaggcaacagtcgccagcagccgatgtgaagaccggactccgtgcgcccctcgccgcctctgcctggccacatcgatgttgtgtccgccgcctgctcgcccggatcacgatgaagcccccaaggcctgtccgtacctgcagcaaagttctcgtcctgctttcactgctggccatccaccagactactactgccgaaaagaatggcatcgacatctacagcctcaccgtggactccagggtctcatcccgatttgcccacacggtcgtcaccagccgagtggtcaatagggccaatactgtgcaggaggccaccttccagatggagctgcccaagaaagccttcatcaccaacttctccatgatcatcgatggcatgacctacccagggatcatcaaggagaaggctgaagcccaggcacagtacagcgcagcagtggccaagggaaagagcgctggcctcgtcaaggccaccgggagaaacatggagcagttccaggtgtcggtcagtgtggctcccaatgccaagatcacctttgagctggtctatgaggagctgctcaagcggcgtttgggggtgtacgagctgctgctgaaagtgcggccccagcagctggtcaagcacctgcagatggacattcacatcttcgagccccagggcatcagctttctggagacagagagcaccttcatgaccaaccagctggtagacgccctcaccacctggcagaataagaccaaggctcacatccggttcaagccaacactttcccagcagcaaaagtccccagagcagcaagaaacagtcctggacggcaacctcattatccgctatgatgtggaccgggccatctccgggggctccattcagatcgagaacggctactttgtacactactttgcccccgagggcctaaccacaatgcccaagaatgtggtctttgtcattgacaagagcggctccatgagtggcaggaaaatccagcagacccgggaagccctaatcaagatcctggatgacctcagccccagagaccagttcaacctcatcgtcttcagtacagaagcaactcagtggaggccatcactggtgccagcctcagccgagaacgtgaacaaggccaggagctttgctgcgggcatccaggccctgggagggaccaacatcaatgatgcaatgctgatggctgtgcagttgctggacagcagcaaccaggaggagcggctgcccgaagggagtgtctcactcatcatcctgctcaccgatggcgaccccactgtgggggagactaaccccaggagcatccagaataacgtgcgggaagctgtaagtggccggtacagcctcttctgcctgggcttcggtttcgacgtcagctatgccttcctggagaagctggcactggacaatggcggcctggcccggcgcatccatgaggactcagactctgccctgcagctccaggacttctaccaggaagtggccaacccactgctgacagcagtgaccttcgagtacccaagcaatgccgtggaggaggtcactcagaacaacttccggctcctcttcaagggctcagagatggtggtggctgggaagctccaggaccgggggcctgatgtgctcacagccacagtcagtgggaagctgcctacacagaacatcactttccaaacggagtccagtgtggcagagcaggaggcggagttccagagccccaagtatatcttccacaacttcatggagaggctctgggcatacctgactatccagcagctgctggagcaaactgtctccgcatccgatgctgatcagcaggccctccggaaccaagcgctgaatttatcacttgcctacagctttgtcacgcctctcacatctatggtagtcaccaaacccgatgaccaagagcagtctcaagttgctgagaagcccatggaaggcgaaagtagaaacaggaatgtccactcaggttccactttcttcaaatattatctccagggagcaaaaataccaaaaccagaggcttccttttctccaagaagaggatggaatagacaagctggagctgctggctcccggatgaatttcagacctggggttctcagctccaggcaacttggactcccaggacctcctgatgttcctgaccatgctgcttaccaccccttccgccgtctggccatcttgcctgcttcagcaccaccagccacctcaaatcctgatccagctgtgtctcgtgtcatgaatatgaaaatcgaagaaacaaccatgacaacccaaaccccagcccccatacaggctccctctgccatcctgccactgcctgggcagagtgtggagcggctctgtgtggaccccagacaccgccaggggccagtgaacctgctctcagaccctgagcaaggggttgaggtgactggccagtatgagagggagaaggctgggttctcatggatcgaagtgaccttcaagaaccccctggtatgggttcacgcatcccctgaacacgtggtggtgactcggaaccgaagaagctctgcgtacaagtggaaggagacgctattctcagtgatgcccggcctgaagatgaccatggacaagacgggtctcctgctgctcagtgacccagacaaagtgaccatcggcctgttgttctgggatggccgtggggaggggctccggctccttctgcgtgacactgaccgcttctccagccacgttggagggacccttggccagttttaccaggaggtgctctggggatctccagcagcatcagatgacggcagacgcacgctgagggttcagggcaatgaccactctgccaccagagagcgcaggctggattaccaggaggggcccccgggagtggagatttcctgctggtctgtggagctgtagttctgatggaaggagctgtgcccaccctgtacacttggcttccccctgcaactgcagggccgcttctggggcctggaccaccatggggaggaagagtcccactcattacaaataaagaaaggtggtgtgagcctga

SEQ ID NO: 235 - DNA, 4517 bp, Homo sapiens
ctgattccataccagaggggctcaggatgctgttgctgggagctgttctactgctattagctctgcccgggcatgaccaggaaaccacgactcaagggcccggagtcctgcttcccctgcccaagggggcctgcacaggttggatggcgggcatcccagggcatccgggccataatggggccccaggccgtgatggcagagatggcacccctggtgagaagggtgagaaaggagatccaggtcttattggtcctaagggagacatcggtgaaaccggagtacccggggctgaaggtccccgaggctttccgggaatccaaggcaggaaaggagaacctggagaaggtgcctatgtataccgctcagcattcagtgtgggattggagacttacgttactatccccaacatgcccattcgctttaccaagatcttctacaatcagcaaaaccactatgatggctccactggtaaattccactgcaacattcctgggctgtactactttgcctaccacatcacagtctatatgaaggatgtgaaggtcagcctcttcaagaaggacaaggctatgctcttcacctatgatcagtaccaggaaaataatgtggaccaggcctccggctctgtgctcctgcatctggaggtgggcgaccaagtctggctccaggtgtatggggaaggagagcgtaatggactctatgctgataatgacaatgactccaccttcacaggctttcttctctaccatgacaccaactgatcaccactaactcagagcctcctccaggccaaacagccccaaagtcaattaaaggctttcagtacggttaggaagttgattattatttagttggaggcctttagatattattcattcatttactcattcatttattcattcattcatcaagtaactttaaaaaaatcatatgctatgttcccagtcctggggagcttcacaaacatgaccagataactgactagaaagaagtagttgacagtgctattttgtgcccactgtctctcctgatgctcatatcaatcctataaggcacagggaacaagcattctcctgtttttacagattgtatcctgaggctgagagagttaagtgaatgtctaaggtcacacagtattaagtgacagtgctagaaatcaaacccagagctgtggactttgttcactagactgtgcccttttatagaggtacatgttctctttggagtgttggtaggtgtctgtttcccacctcacctgagagccattgaatttgccttcctcatgaattaaaacctcccccaagcagagcttcctcagagaaagtggttctatgatgaagtcctgtcttggaaggactactactcaatggcccctgcactactctacttcctcttacctatgtcccttctcatgcctttccctccaacggggaaagccaactccatctctaagtgctgaactcatccctgttcctcaaggccacctggccaggagcttctctgatgtgatatccacttttttttttttttgagatggagtctcactctgtcacccaggctggagtacagtgacacgacctcggctcactgcagcctccttctcctgggtccaagcaattattgtgcctcagcctcccgagtagctgagacttcaggtgcattccaccacacatggctaatttttgtatttttagtagaaatggggtttcgtcatgttggccaggctggtctcgaactcctggcctaggtgatccacccgcctcgacctcccaaagtgctgggattacaggcatgagccaccatgcccagtcgatatctcactttttattttgccatggatgagagtcctgggtgtgaggaacacctcccaccaggctagaggcaactgcccaggaaggactgtgcttccgtcacctctaaatcccttgcagatccttgataaatgcctcatgaagaccaatctcttgaatcccatatctacccagaattaactccattccagtctctgcatgtaatcagttttatccacagaaacattttcattttaggaaatccctggtttaagtatcaatccttgttcagctggacaatatgaatcttttccactgaagttagggatgactgtgattttcagaacacgtccagaatttttcatcaagaaggtagcttgagcctgaaatgcaaaacccatggaggaattctgaagccattgtctccttgagtaccaacagggtcagggaagactgggcctcctgaatttattattgttctttaagaattacaggttgaggtagttgatggtggtaaacattctctcaggagacaataactccagtgatgtttttcaaagattttagcaaaaacagagtaaatagcattctctatcaatatataaatttaaaaaactatctttttgcttacagttttaaattctgaacaatttctcttatatgtgtattgctaatcattaaggtattattttttccacatataaagctttgtctttttgttgttgttgttgtttttaagatggagtttccctctgttgccaggctagagtgcagtggcatgatctcggcttactgcaacctttgcctcccaggtttaagcgattcttctgcctcagcctcccgagtagctgggaccacaggtgcctaccaccatgccaggctaatttttgtatttttagtaaagacagggtttcaccatattggccaggctggtctcgaactcctgaccttgtgatctgcccgcctccattgtgttgttatttgtgagaaagatagatatgaggtttagagagggatgaagaggtgagagtaagccttgtgttagtcagaactctgtgttgtgaatgtcattcacaacagaaaacccaaaatattatgcaaactactgtaagcaagaaaaataaaggaaaaatggaaacatttattcctttgcataatagaaattaccagagttgttctgtctttagataaggtttgaaccaaagctcaaaacaatcaagacccttttctgtatgtccttctgttctgccttccgcagtgtaggctttaccctcaggtgctacacagtatagttctagggtttccctcccgatatcaaaaagactgtggcctgcccagctctcgtatccccaagccacaccatctggctaaatggacatcatgttttctggtgatgcccaaagaggagagaggaagctctctttcccagatgccccagcaagtgtaaccttgcatctcattgctctggctgagttgtgtgcctgtttctgaccaatcactgagtcaggaggatgaaatattcatattgacttaattgcagcttaagttaggggtatgtagaggtattttccctaaagcaaaattgggacactgttatcagaaataggagagtggatgatagatgcaaaataatacctgtccacaacaaactcttaatgctgtgtttgagctttcatgagtttcccagagagacatagctggaaaattcctattgattttctctaaaatttcaacaagtagctaaagtctggctatgctcacagtctcacatctggtgggggtgggctccttacagaacacgctttcacagttaccctaaactctctggggcagggttattcctttgtggaaccagaggcacagagacagtcaactgaggcccaacagaggcctgagagaaactgaggtcaagatttcaggattaatggtcctgtgatgctttgaagtacaattgtggatttgtccaattctctttagttctgtcagcttttgcttcatatattttagcgctctattattagatatatacatgtttagtattatgtcttattggtgcatttactctcttatcattatgtaatgtccttctttatctgtgataattttctgtgttctgaagtctactttgtctaaaaataacatacgcactcaacttccttttctttcttccttcctttctttcttccttcctttctttctctctctctctttccttccttccttcctccttttctctctctctctctctctctctcttttcttgacagactctcgttctgtggccctggctggagttcagtggtgtgatcttggctcactgctacctctaccatgagcaattctcctgcctcagcctcccaagtagctggaactacaggctcatgccactgcgcccagctaatttttgtatttttcgtagagacggggtttcaccacattcgtcaggttggtttcaaactcctgactttgtgatccacccgcctcggcctcccaaagtgctgggattacaggcatgagccatcacacctggtcaactttcttttgattagtgtttttgtggtatatctttttccatcatgttactttaaatatatctatattattgtatttaaaatgtgtttcttacagactgcatgtagttgggtataatttttatccagtctaaaaatatctgtcttttaattggtgtttagacaatttatatttaataaaatggtggaatttaaa

SEQ ID NO: 236 - DNA, 2383 bp, Homo sapiens
aaaaaaaaaaaaaaaaaaaacaccagtttttccaacatctaattgagcttttgattaattccgtgtaccagattctactgaagaaaggtagccatggaagagaatatggaagagggacagacacaaaaagggtgttttgaatgctgtatcaaatgcctggggggcattccctatgcctctctgattgccaccatcctgctctatgcgggtgttgccctgttctgtggctgcggtcatgaagcgctttctggaactgtcaacattctgcaaacctactttgagatggcaagaactgctggagacacactggatgtttttaccatgattgacatctttaagtatgtgatctacggcatcgcagctgcgttctttgtgtatggcattttgctgatggtggaaggtttcttcacaactggggccatcaaagatctctatggggatttcaaaatcaccacttgtggcagatgtgtgagcgcttggttcattatgctgacatatcttttcatgttggcctggctgggagtcacggctttcacctcactgccagtttacatgtacttcaatctgtggaccatctgccggaacaccacattagtggagggagcaaatctctgcttggaccttcgtcagtttggaattgtgacaattggagaggaaaagaaaatttgtactgtctctgagaatttcttgaggatgtgcgaatctactgagctgaacatgaccttccacttgtttattgtggcacttgctggagctggggcagcagtcattgctatggttcactaccttatggttctgtctgccaactgggcctatgtgaaagacgcctgccggatgcagaagtatgaagacatcaagtcgaaggaagagcaagagcttcatgacatccactctactcgctccaaagagcggctcaatgcatacacataaatgcatcttcctgttctttctaccatttgaatgcattggtgtttaactaagggccatccaaccatccaacctttaaaaaacaaaacgaaagtgcttctcatcaatgatatgtaaggtgacttatgaatcacctgagtacaattctttgttgtttagcacttaaatttcccaatttattaaattgatgtaaatcagatcttttctacaagctcctatccagccttttttttgaaatttctcaaactcatttactagttctgtaaaatcaaagatactaacattgtcaaatgcaaagatttgtttgatttttaaccacttcccatgtgttatacataacaccttttgcattatgtcttatgttttgaaaagaaaatagccttttatactttttagttttgatttcggtaactagtttaactacaggtaaccttcaaaggaccattgtacattatgaacaatagatagagattacatcttgatgactcttgaaatatggaaattttgtctgaagatcagtggccatattactgtaggccctggttcatgttttcatcaatctaaggtgcaatttctaaatttgtaagagtaggtttaaaaaaaaaagtgcttcttatctttgttaacattgtacttttccttgatgttcttaaaaggtatttccctcagattactcatgtttatgttgtgagcatgtagaaacagtaatgctaatgcatggctagttgcctttttaagattgtgacaccaggcttaccttttaaagtttagtatatagagacaattttaatggaaataactactgtagactattgaagaatgatctctttgtgatttaagaagtggctggattggaacttttaatatgctaatgtggaaaattaattacctttatgaaggtggtttattacaaataagcacactaacccctcggaagttgttttacctactttaaaagttttaatggattgcacctctgtaaactattcctaaaatgtgtatgatatatttgaaaaggcttccattaatataatagctttgcttgcagccttccaatctatgttggtttacctgtagtgttttataaagtgtggtcagagggccctatagaatgtattgtttgaaagtgtagtgatatatttgtgtttttatttcaagtaagtcattttaaccgaatgttcattcatattcatttataaaaagtacctgtatcaaaggaattttaacaaagagcaatcagtattattggaccaaatttggtgtttgttttcaccttgacgctcttcttttcattatttctaatgctacaagaatgctgtaaagtgtcttctaaaatgatgtagcctgacaagacatttttttcagtgtataaaactaggtagtattgtgcactgatttgaccattgtgaaatcctttctcagtgtaactgcatttctaataaaaatttattgagtg

SEQ ID NO: 237 - DNA, 5022 bp, Homo sapiens
cggacatggctgcggcccccggaggaggggacgtgaagtgaggagggggttgggaggggagaggacgcgggcgaggaagaccagccccggggccccgatgttgtgactgtgacagactcactggggtttgtacatgctggggaggagccttcctttcaggggtgaccacattcatctgggcatgcctgcagtactcttggcccatggacctgaaggagaagcacctgggcgagcctccctcagccctgggcctgtccacgcggaaggccctcagcgtcctgaaggagcagctggaggcagtgctggaaggacatctcagggagcggaagaagtgtctgacgtggaaggaggtgtggagaagcagcttcctccaccacagtaaccgctgctcctgcttccactggccgggggcctcactcatgctactggccgtgctgctgctgctgggctgctgcgggggacagccagccgggagccgtggggtggggctggtgaatgcctcggccttgttcctgttactgcttctcaaccttgtgctcatcgggcggcaagaccggctgaagcgtcgggaggtagagcggaggctgcgagggatcattgaccaaatccaagatgccctcagggatggcagggagatccagtggcccagtgccatgtatccagacctccacatgccttttgcgccatcctggtccttgcactgggcctacagagacggacacctggtcaacctgccagtcagcctgctggttgaaggagacatcatagctttgaggcctggccaggaatcgtttgcttctctgagggggatcaaggatgacgagcacatcgtcctggagccgggagacctcttcccccccttctcccctccaccctcaccccggggagaagtggagagagggccacagagcccccagcagcaccggcttttccgtgtccttgagacccctgtgattgacaacatcagatggtgcctggacatggccctgtcccgaccagtcactgccctggacaatgagcggttcacagtgcagtcggtgatgctacactatgctgtgcccgtggtcctggccggcttcctcatcaccaatgccctgcgcttcatcttcagtgccccgggggtcacttcctggcagtacaccctcctccagctccaggtgaatggcgtcctgcccatcctccccctgctctttccagtcctctgggttctggcaactgcctgtggagaggcccgtgtcctggcccagatgagcaaggcctcacccagctccctgctggctaagttctcagaggatactctcagcagctatacggaggctgtctcctctcaggaaatgctgcgctgcatttggggccacttcctgagggtgctcggggggacatcgccaacgctgagccacagttccagcctgctgcacagcctgggctctgtcacggtcctgtgctgtgtggacaaacaggggatcctgtcatggccaaatcccagcccagagactgtactgttcttcagcgggaaggtggagccccctcacagcagccatgaggacctcaccgatggcctatccacccgctccttctgccatcccgagccccatgaacgagacgccctcctggctggctccctgaacaacaccctgcacctttccaatgagcaggagcgtggcgactggcctggcgaggctcccaagccccccgagccctattcacaccacaaagcgcatggccgcagcaaacacccatctggctccaacgtgagcttcagcagggacaccgagggtggtgaagaagagcccagcaagacccagcctgggatggagagcgacccctacgaagcagaggactttgtgtgtgactaccacctggagatgctgagcctgtcccaggaccagcagaacccctcctgcatccagtttgatgactccaactggcagctgcacctcacctccctcaaacccctgggcctcaatgtgctgctgaacctgtgtgatgccagcgtcaccgagcgcctgtgccgattctccgaccacctgtgcaacattgccctgcaagagagccacagcgccgtgctgcccgtccatgtgccctggggcctctgcgagcttgcccgcctcattggcttcactcctggggccaaggagcttttcaagcaggagaaccatctggcgctgtaccgcctccccagtgccgagacaatgaaggagacatcgctggggcggctctcctgtgtcaccaagcggcggcctcccctcagccacatgatcagcctcttcattaaagacaccaccaccagcacagagcagatgctgtcccatggcaccgctgatgtggtcttagaggcctgcacagacttctgggacggagctgacatctaccctctctcgggatctgacagaaagaaagtgctggacttctaccagcgagcctgcctgtctgggtattgctctgccttcgcctacaagcccatgaactgcgccctgtcctctcagctcaatggcaagtgcatcgagctggtacaggtgcccggccaaagcagcatcttcaccatgtgcgagctgcccagcaccatccccatcaagcagaacgcccgccgcagcagctggagctctgacgaagggatcggggaggtgctggagaaggaagactgcatgcaggccctgagcggccagatcttcatgggcatggtgtcctcccagtaccaggcccggctggacatcgtgcgcctcattgatgggcttgtcaacgcctgcatccgctttgtctacttctctttggaggatgagctcaaaagcaaggtgtttgcagaaaaaatgggcctggagacaggctggaactgccacatctccctcacacccaatggtgacatgcctggctccgagatccccccctccagccccagccacgcaggctccctgcatgatgacctgaatcaggtgtcccgagatgatgcagaagggctcctcctcatggaggaggagggccactcggacctcatcagcttccagcctacggacagcgacatccccagcttcctggaggactccaaccgggccaagctgccccggggtatccaccaagtgcggccccacctgcagaacattgacaacgtgcccctgctagtgccccttttcaccgactgcaccccagagaccatgtgtgagatgataaagatcatgcaagagtacggggaggtgacctgctgcctgggcagctctgccaacctgcggaacagctgcctcttcctccagagcgacatcagcattgccctggatcccctgtacccatcccgttgctcctgggagacctttggctacgccaccagcatcagcatggcccaggcctcggatggcctttctcccctgcagctgtcagggcagctcaacagcctgccctgttccctgacctttcgccaggaggagaccatcagcatcatccggcttatcgaacaggctcggcatgccacctatggcatccgtaagtgcttcctcttcctgctgcagtgccagctgactcttgtggtcatccagttcctttcttgcctggtccagctgccgccactcctgagtaccaccgacatcctgtggctgtcctgcttttgctaccctctgctcagcatctctctgctggggaagcccccccatagctccatcatgtctatggcaacggggaaaaacctccagtccattcccaagaagacccagcactacttcctgctctgcttcctgctcaagttcagcctcaccatcagctcctgcctcatctgctttggcttcacactgcagagcttctgtgacagctcccgggaccgcaacctcaccaactgctcctccgtcatgctgcccagcaacgacgacagggctccagcctggtttgaggactttgccaatggactgctgtcggctcagaagctcacggccgccctgattgtcctgcacactgtcttcatttccatcacccatgtgcatcgcaccaagcccctgtggagaaagagccccttgaccaacctctggtgggccgtgacagtgcctgtggtgctgctgggtcaggtggtccagacggctgtggacctgcagctgtggacacacagggacagccacgtccactttggcctggaggacgtgcccctgctgacatggctcctgggctgcctgtccctggtccttgtggtggtgaccaatgagatcgtgaagctacatgagattcgggtccgagtccgctaccagaagcgacagaagctgcagtttgaaactaagctgggcatgaactctcccttctgagccactggctgtggtggctgtagttgcccccgtccctggggctaaagccagacccatttctgaacaggggagtttgtatcatgaatgtttccaggtttgctcctgcacccgtggcactggaaacccagctccccgtgtcagaccccgctgtcttcctgagccctggggctcactgtggaggagctgacggcctgggcccttggccagtcctggctcttccctgggcctcaccagggacactcttgaatgtatggcctcaggcgctccctagaggggccctaaaccccctcacctgtgagctaccccctttagggatcccttgcccccttggagatcccttgccccccagtgcctctgctcgtgggtccctggacacggccttgaagccaaccttctttggaggagcaacagcagcagccttggccgacgcgtccaactcccaaggctgccgtggagggcaggggggtggtgcttgcctggatgtggccccgagtgcctcccctccctccctctgtgggggagtctcccgcctgaacctgaagatggagcagggcccccgcttcgccctggagcctcttcctgtgcctggctcaagctggctgcctgtcagtcttggggaatctggcccaggtctcctcagcctctgccccagttctgggagaagtttctactggtgtatattttttactggaaatgagccttttaggaatgaatgtagactggtttgtattaaaatgtgtcaattgct

SEQ ID NO: 238 - DNA, 6611 bp, Homo sapiens
tgactgcatcacctggtctgtgaattttccattagaagcttggtgtgctgttaggtgaaagacttgctcagctatgcgtcattgggttttatcaacatataggcgaaaaaaatcctggtctctgagtgtacagctgagatgaaaatttcttttattggaggaagtattgagtgtgtgctctcaaatgcggcctcagttgagtagtgcattcctgagttttggaagcaaatttgcaaacaattgagagtcgtacagtgggtgttctaactggattcaggttttttctaatgtaattttttcacacgtaaattaaaaagtttagaaatgtcacacataacttcataacactttatggagaaatggttgtacttttaatttttttctttttatttatactccaactgactgagcagaggttgtacttctaaataactttgtggaagtttttagtaccataatttttataattttcattccagtcctttgatatttatgacagtacttctgaagcgcttactgagtgccggacactgttgtaagtgctttacggaacttgacttttttttttttttgagacggactctcgctctgtcgcccaggctggagtgcagtggtgcagtggctcgatctcggctcactgccacctctccctcatggtttcaaacacttctcctgcctcagcctcccaggtagccaggattatagccgcccgccaccactcccgactaattttattttgtatgttcttttttagtagagacggaggagtttcaccatgttggccaggctggtatcgacctcctgacctcaagtgatgtgtccatctcggcctcccaaggtgctggaattacaggtgtgagccactgtgctcggcctaccttttttttttgttttttgtttttttgaaaaggagtttcgctcttgtccaggctggagtataatggtgcgatctcagctcaccgcaatctccgcctcccagattcaagcgattctcctgcctcagcctcctcaggagctgggattacaggcgcccaccgccatgcccggctaatttttgtatttttagtagagacggggtttcactatattggccaggctggtctcgaactgctgacctcaagtaatccgcctgcctcagcctcccaaagtgctgggattacagacgtgatccaccaggatcacaccaggccgcgcctggcctgctttcattttaaaagtcaaatttgtcatccgcctcagtgcttgtaatcttttctgagtgagatactgaaatttgcagtttcgttttgcttgcacttgttcactggaccagtagtcactgttaaatgtaaaagtatctacttcctctgaaagttttttattcctttatttcctgcctgggcttgtcctccaccctacatgtatgcgtagtagatttagtgtttgttatcctaacctttaggtttagggattgactgggtttctgactttttatttggccaatgaggacgatacagaaaatgaagcattggtcattatcacattttaacgctgaaaaagtaagaaggacaaccccggaataaaatgatatcagtatcaagataaaagtttggaatgggagaaaaattctcaaagcctgaaagaaaatctgtagttacttttggtgacgctgtccagttcccacaatgtatcattccttatctgaaactagacatcctctgcagccagaagaacaagaagtaggcattgaccccttgtccagttactctaacaagtctggaggagattcaaataaaaatggaagaagaacaagttctactttagactctgaagggacttttaattcctataggaaagaatgggaagaactatttgtaaacaacaattacttggcaacaataaggcagaaggggattaatgggcagctgagaagcagcaggttccgcagcatttgctggaagctatttctttgtgttcttcctcaagacaaaagtcaatggataagtagaattgaagaattaagagcatggtatagcaacattaaagaaatacatattaccaacccgaggaaggttgttggccaacaagatttgatgatcaataatcctctttcacaggatgaagggagtctttggaacaaattcttccaagataaagaacttcgatcaatgattgaacaagatgtcaaaagaacgtttcctgaaatgcagtttttccagcaagaaaatgtgagaaaaattcttacagatgttcttttctgttatgccagagaaaacgagcagttgctttataaacagggcatgcacgaactgttagcacctatagtctttgtccttcactgtgaccaccaagcttttctacatgccagtgagtctgcacagcccagtgaggaaatgaaaactgtcttgaaccctgagtatctggaacatgatgcctatgcagtgttctcacaacttatggaaactgctgaaccttggttttcaacttttgagcatgatggtcagaaggggaaagaaacactgatgactcccattccctttgctagaccacaagatttagggccaacaattgctattgttactaaagtcaaccagatccaggatcatctactgaagaagcatgatattgagctttacatgcacttgaacagactagaaattgcaccacagatatatgggttaaggtgggtgcggctgctatttggacgagagttccccctgcaggaccttctggtggtctgggatgccttgtttgcagacggcctcagcctgggtttagtagattatatcttcgtagccatgttactttacatccgagatgctttgatctctagtaactaccagacctgtctcggccttctgatgcattacccattcatcggggatgtacactcactgattcttaaggctctgttccttagagatccaaagagaaatccaagaccagtgacttatcaattccatccaaatttagattattacaaagcacgaggagcagacctcatgaataaaagccggaccaatgccaaaggtgctcccctgaatataaataaggtctctaatagcctgattaattttggaagaaagttgatttccccagcaatggctccaggcagtgcaggtggccctgtacctggaggcaacagcagtagctcctcctctgttgtaattcctaccaggacctcagcagaggccccaagccatcacttgcaacagcaacagcagcagcagaggctgatgaaatcagaaagcatgcctgtgcaattgaacaaagggctaagttctaaaaacatcagttcatctccaagcgttgagagtttgcctggaggaagagaattcactggctctccaccttcatctgctactaaaaaagattccttttttagcaacatctcacgttctcgctcacacagcaaaactatgggcagaaaagaatctgaagaagaattagaagcccaaatttccttccttcaagggcagttgaatgacctggatgccatgtgcaaatactgtgcaaaggtgatggacactcatcttgtaaatattcaagatgtgatattacaagaaaatttggaaaaagaagatcaaattctggtttccctggcaggattaaaacagatcaaagacattctaaaaggttccctgcgttttaaccagagccagctagaggccgaagagaacgaacagatcaccattgcggacaaccactactgctccagcggccagggccagggccgaggccaaggccagagcgttcaaatgtcaggggccattaaacaggcctcttcagaaacgccagggtgcactgatagagggaattccgatgacttcatcctgatttccaaagatgatgatgggagcagtgccaggggctccttctccggccaggcccagcctcttcgcaccctcagaagcacctctgggaaaagccaggccccagtctgctccccactggtgttctcagatccactgatgggcccagcctcagcttcctccagcaaccccagctccagtcctgatgacgacagcagcaaggactctggcttcaccattgtgagtcccctggacatctgaccacagtgcccagtcctgccccacagggatctagccacccttcagtggccccaaggccagactgaggctcatccagtggagaaccttcttaaaccactgcttccttcccggcatgcatttggcattggtccagccctttgaaaccccttagagagaagcatatatggccacaaagcacagaggcttaggtttgccacatgcagacagggctttctgggcccttacctaatccccacccgactcttgctctgagttagagctgagttacgtacccagtatcacactcacagttagaaaagaccgaatcacaatttagaatcacttttcctctgtccccttctccccagctaagaatgtgtggcacctccatcagttatacttagaaggagcagaaatagttattttcgtatcttctatccctcaaagcatcagacatgggaaaattggtttataccaagaaagcttcctctgtggaaatctgtctcagcctactttattcctgcattgggaagccatatcgcagagctaaatgcaatagaatgaaccagaactagtggattccagggctgggggaaaaaaaaaaaagaaaaaacctcattactgacctctcaaagttataaggatctctgcaaacaggatctaagcttaggaataatatttaggtgtgatatagtgttagatttttttgatgtattaaagaatgcatctccaatccttaggccatatcaactttggccatcaatatctctccttaaacaattatatttcaccttttagaatctttcatagccagaaaacaagattactgtaagccagttttagctgcactgatttcaaaagatataagaatattactatccttcaaatggaaaatgcgaccttgactttatgggataaacatctttcagacagtcagttttctagtcaggtttctctggtttcagagctgtatatacctgtcaactgaggaataaagggaaaaacccaagttcattcccacccaaagtcagaatccctcattggccttaaggtagcagtcataagacagagaattggacctagagtcccttctgtggggaataaggatacctagagaacattccacatgccaagaggatgcaggatttctacacaaccccttcccttcttggaagtcaagtgtaggtactgcagggcctgtgctcagctgtgaaccccgtatcctgggccccactgccgggaccgggtctgacatgccagtgccttcctgggctgagcacagattagagactctcccccttgtcagtcagcaccttaggaaaccatgatgggcacagagcatcacatgagctgtttctctccttaaagaagatccctggaaaggatgcttttcctctcctttgcctgcgcaggaattctaacaggagtgggtgaggatggcagagggacacagtgcctgtctcgcctccatcagggagagcagccatgccagggatgactagctctttgagcctgtcctcagaggatggcgaggcagccgggcagtggaggccttcatggtaacaaatgaaagctcagtatagaggaacagacactgtttacgtccctcccactgctaaccttatatatctctatagacaaatgtgataatgacatgatttcccacctgccctccaagaaaatggtgactcactctcaagtcagctactgtagagagggttctaattggttctgcaatttgctcttaaactctagcagggaactctcctcttaccacatcagcatgtaaggtgaataataactctggttttgccagacagcaggttgtctgaccttcaaccactgggcaattgcctggcagatgcacacagtagctccctggcttctggctctgagtgttcctctcagcacctctgagtaagctgctgccaagcacatatccctatgacaacactttgtaaaagccgcggggcccccatacagcgagtgaccttgcaactgtgcagggttgccattggtcactttctcaccttgggaaggtgtcagtgttttcagttctaaggtaagaggtgtagagctgttcccaccagggctctgggacagactggaaaggaccacagacctggccatccctgggcagcagggccagtgtcacctgctgacctctagtatttcctttgccctagagctagagtcatgatagctgagggtcactcgccctgcaagagtcactaggcacccaccatgccaataaggctctccgctggctccctgcagttggctgggtgtttaatagtcactgaaaactcccagccctgctgcacactagaggcaggtcctctcggtcctctccatcctgtgcttctgtggcccccagcaagctcaccgcctccttggaggagagagacatacaaggacagtgggtcatgggtagtaccagcctcaaattcccacaggctcatactcagacaattgtattactgccttatgttttttaagtgtttttttaaattcttcatagttgagtattatttgcaattttattagttacagtgctattaaagaatatgtgctcctttt

SEQ ID NO: 239 - DNA, 7819 bp, Homo sapiens
ggatctgatactgcccaccatacagaagtccttactgaggagtccagagaatgttattgaaactatttctagtctgctggcatcagtgacgcttgacctcagccagtatgccatggacatcgtgaaaggactggctggtcacctgaaatccaacagtccccgcctgatggatgaagctgtgctggcactgcggaacctggcacgccagtgcagtgactcttcggccatggaatccctgaccaagcacctatttgctatcctcggaggctcggaaggaaaactaactgttgtagcccagaagatgagcgtcctctcagggattgggagcgtcagtcatcacgtggtgtctggaccttccagtcaggtcctgaatgggatcgtggctgagctgttcatcccgttccttcagcaggaagttcatgaagggaccttggtacacgctgtctcagtcctggctctctggtgtaaccgattcactatggaagtgcccaagaagctcactgaatggttcaaaaaagctttcagccttaaaacctccacatctgcggtgaggcatgcctacctgcagtgcatgttggcctcttaccggggtgacacgctgttgcaggccctggacttactgcccttgctcatccagacagtggagaaggcagcctcccaaagcactcaggttcccaccatcaccgaaggggttgccgcagccttgttgctcttaaagttgtcagtggctgactcacaggctgaggccaaactgagcagtttctggcagttgattgtggatgagaaaaagcaggttttcacttctgagaaattcctggtcatggcttcagaggatgccctgtgtactgtgttgcatctgacagagagacttttccttgaccacccgcatagactcactggcaacaaagttcagcagtaccaccgggctctggtggcggtgctcctgagccgcacctggcacgtccgcaggcaggctcagcagacagttcggaagctgctgtcctctcttgggggctttaagctggcgcacggactcttggaggagctgaagactgtcctcagttctcacaaggtgctgcccttagaggctttggtgactgatgctggagaggtgactgaggcaggcaaggcctacgtgcctccacgggtcctgcaggaggctctgtgtgtcatctccggtgtgccagggctcaagggtgatgtcaccgacactgaacaactggcccaggaaatgctgatcatctcccaccacccatccttagttgccgtgcagtctggactttggccagcacttcttgccaggatgaagatcgatcctgaagcctttatcaccaggcacctggatcagatcattcccaggatgaccacacagagtcccctaaaccagtcctccatgaatgccatgggctccctttccgtcctgtcgccggaccgggtcctcccacagctcatcagcaccatcactgcctccgtgcagaaccctgcactgcgcctggtgacgcgggaggagtttgccattatgcagacccctgctggggagctgtatgacaaatccatcattcagagtgcccagcaggacagcataaaaaaggccaacatgaagcgagagaacaaagcttattccttcaaagagcagatcatcgagctggagctgaaggaggagataaagaagaagaaaggcatcaaagaggaggtgcagctgaccagcaagcagaaggagatgctgcaggcccagctagacagggaggcgcaggtccggaggcggctgcaggagctggatggggagctggaggcggcgcttggactgctggacatcatcctggccaagaacccgtccggcctgacccagtacatccctgttttggtcgactcttttctgcccttgctgaagtctcccctggctgctcccaggatcaagaaccccttcttgtccttggctgcctgtgtcatgccctctaggctcaaggctttgggcactttggtgagccacgtgaccctgcgcctgctgaagccagagtgtgtcctggataagtcctggtgccaggaagagctgtcggtggctgtgaagagggcggtgatgctgctgcacacccacaccatcaccagcagggtgggcaagggggagccaggtgctgcgcccttgtccgcgccagccttctccttagtcttcccgtttctgaagatggtgctgacggagatgccccaccacagtgaggaggaggaggagtggatggcccagattcttcagatcctcactgtccaagcccagctgagggcctcccccaacaccccacccgggcgggtggacgagaatggcccggagttgctgcctcgcgtggccatgctgcgtcttctgacttgggtgatcgggacgggctcgcctcgcttacaggttctggcttcagacaccctgaccaccctgtgtgccagcagcagtggtgatgatggctgtgcctttgcagagcaggaggaggtggacgtgctgctctgtgccttgcagtccccgtgtgccagcgtgcgggaaaccgtgctccgggggctgatggaactccacatggtattgccagcacctgatactgatgagaagaatggcctgaaccttctgcggagactctgggtggtcaagtttgacaaggaggaggagatccggaagctggctgagaggctctggtcaatgatgggcctagacctgcagccagacctctgctccttgctgattgacgacgtgatctatcatgaggcggctgtaaggcaggcaggggccgaagccctctcccaagcagtggcacgttaccagcggcaggcggcggaggttatgggcaggctcatggagatttaccaggaaaagctctaccggccgcccccagtgctggatgctttgggacgagttatttcagaatctcctccagatcagtgggaagccaggtgtggcttggcgttggccctcaacaagctctcccagtatttggacagctctcaggtgaagccactctttcagttttttgtccctgatgccctcaatgaccgacacccagatgtccggaagtgcatgttggatgcagccctcgcaacgctcaacactcatgggaaggagaacgtcaactcgctgttgccagtattcgaggagttcctgaagaacgcgcccaatgatgccagctacgatgctgtgcgacagagtgtggtggtcctgatgggctctctggccaagcacctggacaagagtgaccccaaagtgaagcccattgttgccaagctcatcgctgccctctccaccccctcccagcaggtccaggagtccgtagccagctgcttgccacccctcgtgccagccatcaaggaggatgctggagggatgatccagaggcttatgcagcagctgctggagtcagacaagtacgcagagcgcaaaggggccgcgtatggcctggcgggcctggtgaagggcctgggcatcctctcgctgaagcaacaggagatgatggcggcactgactgatgccatccaagataagaagaacttccgccggcgagagggagccctctttgccttcgagatgctctgcaccatgctggggaaactttttgagccgtatgtggttcacgtgctgccccatctgctcctgtgctttggggatggaaaccagtatgtgcgtgaggctgcagatgactgtgccaaggctgtgatgagcaacttgagtgctcacggggtgaagctggtgctcccctccttactggctgccctggaggaggaatcgtggcggaccaaagctgggtcagtggagcttcttggggcaatggcgtactgtgctcctaagcagctgtcatcctgtctacccaacattgtgcccaagcttacggaggtgctgaccgactcccatgtcaaagtccagaaggctggacagcaggcgctcaggcagatcggctccgttatcaggaacccggagatcctggccattgctccagtcctcctggatgccctgacggatccctccaggaagacccagaagtgcttgcagaccctgctggacaccaagtttgtccacttcattgatgccccatccctggccctcatcatgcccattgtccagagagccttccaggaccgttccacggacacgcggaagatggcagcccagattattggcaacatgtactccctgacagaccagaaggacttggctccgtacctgcccagcgtgacgcctggcctgaaagcatcgcttttggaccctgtgcctgaggtgcggaccgtatctgcaaaggcccttggggccatggtgaagggcatgggggagtcgtgctttgaggacttgctgccgtggctgatggagacactgacctatgagcagagctctgtggatcgctcaggcgctgcacaggggttggctgaggtcatggccggtttgggggtggagaagttggagaagttgatgccagaaatcgtggctacagccagcaaagtggacattgcaccccatgtccgagatggctacattatgatgtttaactacctgcccatcacctttggagacaagtttactccttatgtggggcccatcatcccctgtatcctcaaagctcttgctgatgagaatgagtttgtgcgtgacaccgccctgcgcgcgggccagcgggttatctccatgtacgctgagacagccatcgccctgctgctgccccagctagagcaaggcctctttgatgacctttggagaatcaggttcagctctgttcagctccttggggatctcctgtttcacatctcaggagtcactgggaagatgaccacagaaactgcctctgaggatgataactttggaactgcccagtccaacaaggcgatcatcactgccctgggggtagagcggcggaaccgggtgttggcagggctgtacatgggccgctcagacacccagctggtggtgcggcaggcgtccctgcatgtctggaagattgttgtctccaataccccccgcaccttgcgtgagatcctacccactctctttgggctcctgctgggtttcctggccagcacgtgtgcagataagagaacgattgcagcgagaacattgggagatcttgtgcggaagttaggggagaaaatcctccccgagatcatccccatccttgaggaaggcctgaggtctcagaagagcgatgagaggcagggtgtgtgcattggcctaagtgagatcatgaagtccaccagccgggatgccgtgctgtatttctctgaatccctcgtgcccacggcaaggaaggctttgtgtgacccactggaggaggtcagagaggcggcagccaagactttcgagcagctgcattccaccatcggccaccaggctctggaggacattctcccatttttactaaagcagctggatgacgaggaggtgtcagagtttgccttggatggtctgaagcaagtcatggctattaagagtcgtgtggtgctgccctaccttgtgcccaagctgacaacgccacctgtcaacacccgggtgctggctttcctttcgtcagtggctggtgatgccctcacccgtcatcttggcgtgatcctcccagcggtcatgctggccctgaaggaaaagcttgggaccccagatgagcagctggagatggccaattgtcaggctgtgatcctctccgtagaggatgacacagggcaccggatcatcatcgaggatctgctggaggccacccgcagccctgaggtgggcatgaggcaagctgctgccatcatcctcaacatctactgttcccgctcaaaggctgactacaccagccacctgcggagcctggtctcgggcctgatccgcctcttcaatgactccagccctgtggttctggaggagagctgggatgccctaaatgccatcactaagaagctggatgctggcaaccagttggcactcattgaagagctgcacaaggaaatccggctcatagggaacgagagcaaaggcgagcatgtgccaggattctgcctcccgaagaagggagtgacctccatccttccagtgttgcgggaaggagtcctgactggcagccctgagcagaaggaggaggcagccaaagccttaggcttggtaatccgcctgacctcggctgacgccctgaggccctccgtggtcagcatcactggccctctgatccgcatcctgggggacaggttcagctggaatgtgaaggcggctctgctcgagacactcagcctcttgttggctaaggttgggattgccctgaagcccttcctgccccagctgcagaccactttcaccaaagccctgcaggactccaaccggggggtgcgcctgaaggccgcagatgctctggggaagctcatttccatccacattaaggtggaccccctcttcacagagctgctcaatggcatccgcgccatggaggacccaggtgtcagggacaccatgctgcaggccctgaggtttgtgattcagggagcaggggccaaagtggatgccgtcatccggaaaaacatcgtctcactcctgctgagcatgctgggacacgatgaggacaacactcgcatctcctcagccgggtgcctaggggaactgtgtgcctttttgactgaagaggagcttagtgccgttctacagcagtgcttgctggcggacgtgtccggcattgactggatggttcggcacgggcggagcctggcactttccgtggctgtgaatgtggctcctggcagactttgtgccggcagatatagcagtgatgttcaggaaatgatcctgagcagtgccacggcggacaggatccccattgcggtgagcggggtccggggcatgggctttctcatgagacaccacatcgagacaggcggagggcagttgccggccaaactttccagcctgttcgttaagtgtctgcagaacccatccagcgacatcaggctggtggctgagaagatgatctggtgggcaaataaggacccactgcctcccctggacccccaggccatcaagcccatcctgaaggctcttcttgacaacaccaaggataagaacaccgtggtcagggcctacagcgaccaggcaattgtcaacctcctcaagatgcggcagggtgaagaggtgtttcagtccctctccaagatcctggatgtggccagtttggaggtgctgaacgaggttaaccgaaggtccctgaagaagctggccagccaggccgactccacggagcaggtggacgacaccatcctgacatgagaggcctgggccagcagcagcattgccgctccacatctttgctcaatgttttcatttttgaaaatacatttgttccaatggggagcttggaagatggcgttcccagaaagtattttaatatcaatagaccacagccaaagccttaaatcaaacccacacacaactgaaaattgcctcctccatctctcaccttttcctgtggagaagagaaggaaaagcacacgcatgcgcctcagcaaatggcagcccaggagctgtttgtccagtttagcatggctaggtctggaactataatagcagggtcagactgtgggttcctcttctcctgtgcttgagctctggtttgagagctggcgctaccaacctttttcctatatcccgagtggggcacagacggtggatctctgcccagtgtggtgtgtctggcttggcttttcaatattgtgaggtctgaatggatctgacccctgtcagatgaaaatgattcacagctctggcagttcccaagtctggggaggggtataggtttgaaaggctgtttgaaagaggaatgtttaataaaggctttgatttaatctt

SEQ ID NO: 240 - DNA, 5878 bp, Homo sapiens
caaaacatagagtaccccggcagccggcaagaggaagagagagtggcttccacatccccaatatcctagaggcggctgagccggaggcggtcgcacaaagcgggccccgggggccgttccagccgcggccgaccatagagatgcggctcccgccggctctgggtctggagataggaaagctgaggcccagagaagcgaagcgactgtgtctgtccaagaccacgcgccctcctgcccggaagataagcgtatttcttctctggtgcccacctgtctcctacctcaccctgccctcccgcaggtgaaggttcttaatcttgacggctcagcgtcctccttggctccccccggaggccatgtatggtcaagcttgaagattccccagaacaacgctaatattcacatttaagaagccaaaacacacaagtcggtggtgatgacagacccccttttggactcacagccagccagtagcaccggggagatggatggactgtgccctgagctattgctgatccccccgcctctctctaaccgtggaatcctggggcctgtccagagcccctgtccttcccgggaccctgcacctatacctactgagccaggctgcctgctggtagaggccacagcaactgaagagggaccagggaacatggagatcattgtggagacagtagctggaaccctgaccccaggtgctcctggagagaccccagctcccaaactgcctccaggagagagagaaccttcacaggaagcaggtacacccttgcctgggcaggagacagctgaagaggagaatgtagagaaagaagagaagagtgacacccagaaggactcccaaaaggctgtggataaaggccaaggggctcagcggctggaaggggatgtggtctctggcaccgagtccctcttcaagacccatatgtgtccagagtgtaagcgctgctttaagaagcggactcatctggtggagcacctgcatctccacttcccagaccccagcctccagtgccctaactgccagaagttcttcaccagtaagagcaagctcaagacccatctgctgcgggagctgggtgaaaaggcccaccactgcccactgtgccactacagtgcggtggagaggaatgcactcaaccgccacatggccagcatgcatgaagatatttccaacttctactcagacacctatgcctgtcctgtctgccgtgaggaattccgcctcagccaggccctaaaggagcacctcaagagccacacggcagcagccgcagcagagccattaccccttcgctgctttcaggagggctgcagctatgcagcacccgaccgcaaggccttcattaagcacctgaaggagacccatggggtgcgggctgtggagtgccgccatcactcatgtcccatgctctttgccacagccgaagccatggaggcccaccacaagagtcactacgccttccactgcccccactgtgattttgcttgttccaataagcacctattccgtaaacacaagaagcagggccaccctggcagtgaagagctgcgctgcaccttctgcccctttgccaccttcaacccagtggcttaccaggatcatgtaggcaagatgcatgctcatgaaaagatccaccagtgtcctgagtgcaactttgccactgcccacaagagggtgctcatccgacacatgcttctacatacgggtgagaagccccacaagtgtgagctgtgtgacttcacatgccgagacgtgagctacctatccaagcacatgctgacccactccaacaccaaggattacatgtgcactgaatgtggctatgtcaccaagtggaagcactacctccgtgtgcacatgcgaaaacatgcaggggacctcaggtatcagtgcaaccagtgctcctatcgctgtcaccgggctgatcagctgagcagccacaagctgcggcatcagggcaagtctctgatgtgtgaggtgtgtgccttcgcctgcaagcggaagtatgagctgcagaagcacatggcttcccagcaccaccctggcacaccgtccccactctacccttgccactactgcagttaccagagccgccacaagcaggctgtgctgagccatgagaactgcaagcatacccgcctccgtgagttccactgtgccctctgtgactaccgcaccttcagcaacaccacactcttgttccataaacgcaaggcccatggctatgtacctggagaccaggcctggcagctccgctatgcaagccaggagccagaaggggccatgcagggcccaacacccccaccagattcagagccctcaaaccagctgtcagcccgacctgaggggccaggtcacgaacctgggactgtggtggaccccagcttggaccaggccctgccagagatgagtgaggaggtcaacactggaagacaggagggcagtgaggctccccatgggggtgacctgggtggcagtcccagcccagcagaggtggaggagggcagctgcacactacacctagaggccctgggagtagagctggagtctgtgactgagccaccccttgaggaggtcactgaaacagcccctatggagttcaggcccctgggactggaagggccagatggactggaaggaccagagctatctagctttgaaggtattgggacttctgacttgggtgctgaagaaaatccccttctggaaaagccagtgtctgagccctccacaaatcctccatccttagaggaggctcctaacaactgggtaggaaccttcaagacaactccacctgctgagacagcacccttgcccccattacctgagtcagagtcattactcaaggccctaaggagacaggacaaagaacaagcagaggcattggtgctagaggggcgggtgcagatggtagtgatccagggagaggggcgagccttccgctgcccacactgcccttttatcactcgccgggagaaggccctgaatctgcactccaggactgggtgccaaggccgccgagagcccctgctgtgccccgagtgtggggctagcttcaagcaacaacgcggcctcagcacccacctgctgaagaagtgccctgttctactcagaaagaacaagggcttgcccagaccagattcacccatccctctgcaacctgtgctcccaggtacccaggcctcagaggacacagaaagtgggaagcccccacctgcatcacaagaagcagagctactgcttccaaaagatgctcctttggagcttcccagggagccagaagaaacagaagagcctcttgccacagtctctggttccccagtccctcctgcaggaaactccttgcccacagaggcccctaagaagcactgctttgacccagtccctcctgcaggaaactcctcacccacggaggcccctaagaagcaccaccttgacccagtccctcctgcaggaaactcctcacccacagaggccctgaagaagcaccgctttgagcagggcaagtttcactgcaactcctgcccattcctttgttcccggctctcctctattacctctcacgtggctgaaggctgcagggggggacgtggcgggggaggaaaacgagggaccccccagacccagcctgatgtgtccccgttgagcaatggggactctgctcccccgaagaatgggagtacagagtccagctctggtgatggggatacagttctggttcaaaagcagaagggggctcgcttctcctgccctacatgtccctttagctgccagcaggaacgggctctgaggactcaccagatccggggctgccccctcgaggagtctggagagctgcactgcagcctctgcccattcactgctcctgctgccactgccttaaggctccaccagaagcggaggcaccccactgcagccccagcccgtgggccccggccccatctacagtgtggggactgtggcttcacctgtaaacagagccgttgcatgcagcagcaccggcggctcaagcacgagggggtgaagccccatcagtgccccttctgtgacttttcgaccaccagacggtaccggttagaggctcaccagtcccgacacacaggcattggccgcatcccctgcagctcttgcccccagacgtttggtaccaactcgaaactgcgcttgcaccggttaagggtacatgacaaaacacctacccacttctgtccactttgtgactatagtggctaccttcgccatgacatcactcgtcatgtcaacagctgccaccaaggcaccccagcctttgcctgctcccagtgtgaagcccagttcagctcagagacagcacttaagcagcatgctctgcgccgacaccccgagcctgcacagcctgcccctggctctcctgcagagaccactgagggccccctgcactgttcccgctgtgggttgctgtgccccagccctgccagcttacgaggacacacccgtaaacagcacccacggcttgagtgtggggcctgccaggaggccttccctagccgactggctctggatgagcaccggaggcagcagcatttcagccaccgctgtcagctctgtgactttgctgcccgggagcgggtgggcctggtaaagcactacctggaacagcatgaggagacttcagcagccgtggcagcctcagatggggatggggatgctggccagcccccgctacactgccccttttgtgacttcacatgccgccatcagctggtactagatcaccatgtgaaagggcatgggggcactcgtctctacaagtgcaccgattgtgcttacagcaccaagaaccgacagaagatcacctggcacagccgcatccacactggggaaaagccttaccactgtcacctctgcccctatgcctgtgctgatccctctcgtctcaagtaccacatgcggatccacaaggaggaacggaagtacctgtgccctgagtgtggctacaagtgcaagtgggtcaaccagctgaaataccacatgaccaagcatacaggactgaagccataccagtgtcccgagtgtgagtactgcaccaaccgggctgatgcactgcgtgtgcaccaggagacccggcatcgagaagcacgggctttcatgtgtgagcagtgtggcaaggccttcaagacgcgcttcctgctgcgcacccaccttcgcaagcacagtgaggccaaaccctatgtgtgcaatgtgtgccaccgtgctttccgctgggctgctggcctgcgccatcatgccctcacccacaccgaccgccaccccttcttttgccgcctctgcaactacaaggccaagcaaaagttccaggtggtcaagcacgtacgcaggcaccaccctgaccaagccgacccaaaccagggtgtgggcaaagaccccaccacccccacagtgcacctgcatgatgtgcagctggaggatcccagccctcctgctcctgccgctccccacactggacctgagggctgaaagcctgccccacctcctgtataggaagagggtatggtctgagatgtgcagactgggaccagcgctagcctgaggagctcagagcctaaggaaagactggcttttggggtacaagggtgactagaaccttcctgggactctggctatagtactttgaaattatcacccatataaaagagggacatggactataacgttgatttcttattgctgtacattgcgtttttaacctgcaagttctcagtttcttcaccatcactccatcaaagtccctggctataagatctggattttacccactccatcttctctttccttcttactgtgtcaattcctattttctttcagaatcttctaaaaacagttgtatctaaccgc

SEQ ID NO: 241 - DNA, 1555 bp, Homo sapiens
ccggatggtgcaggaagcgccagctgcgctgcccacggagccaggccccagccccgtgcctgccttcctcggcaagctatgggcgctggtgggggacccaggcacagaccacctgatccgctggagcccgagcgggaccagtttcctcgtaagcgaccagagccgtttcgccaaggaagtgctgccccagtatttcaagcatagcaacatggcgagcttcgtgcgccaactcaacatgtacggttttcggaaggtggtgagcatcgagcagggcggcctgcttaggccggagcgcgaccacgtcgagttccagcacccgagcttcgtgcgcggccgcgagcagctactggagcgcgtgcggcgcaaggtgcccgcgctgcgcggcgacgacggccgctggcgcccggaggacctgggtcgactactgggcgaggtgcaggctttgcggggagtgcaggagagcaccgaggcgcggctgcgggagctcaggcagcagaacgagatcttgtggcgggaggtggtgacacttcggcagagccacggtcagcagcaccgggtcattggcaagctgatccagtgtctctttgggccacttcaggcggggccgagcaatgcaggaggcaagagaaagctgtccctgatgctggatgaggggagctcatgcccaacacctgccaagttcaacacctgccctctacctggtgcccttctgcaggacccctacttcatccagtcgccttctacttacagcctctcccagagacaaatttgggccttagccctcacagggccaggggccccatcatctctgacatcccagaagactctccatcccctgaggggaccaggctttctccctccagtgatggcaggagcccccccgccactgcctgtggctgtggtgcaggccatcctggaagggaaagggagcttcagccccgaggggcccaggaatgcccaacagcctgaaccaggggatcccagggagatacctgacagggggcctctgggcctggaaagcggggacaggagcccagagagtctgctgcctccgatgctgcttcagccccctcaagaaagtgtggaacctgcagggcctctagatgtgctgggccccagtctccaagggcgagaatggaccctgatggacttggacatggagctgtccttgatgcagcccttggttccagagcggggtgagcctgagctggcggtcaaggggttaaattctccaagcccagggaaggaccccacgctcggggccccactcctgctggatgtccaggcggccttgggaggcccagccctgggcctgcctggggctttaaccatttatagcactcctgagagccggactgcctcctacttgggcccggaagccagtccctccccctaagaccccgcgcctctgaaggggcttggaaccagtccgccgctgcacatccttcttggcttcctggccgcctacgggggtgagcgaagcccccactactaaatggcctctctccactaccccgactatccctgcacataaactccgtttttttttttcacc

SEQ ID NO: 242 - DNA, 1077 bp, Homo sapiens
aggatcccaaggcccaactccccgaaccactcagggtcctgtggacagctcactagcggcaatggctgcaggctcccggacgtccctgctcctggcttttggcctgctctgcctgtcctggcttcaagagggcagtgccttcccaaccattcccttatccaggctttttgacaacgctatgctccgcgcccgtcgcctgtaccagctggcatatgacacctatcaggagtttgaagaagcctatatcctgaaggagcagaagtattcattcctgcagaacccccagacctccctctgcttctcagagtctattccaacaccttccaacagggtgaaaacgcagcagaaatctaacctagagctgctccgcatctccctgctgctcactcagtcatggctggagcccgtgcagctcctcaggagcgtcttcgccaacagcctggtgtatggcgcctcggacagcaacgtctatcgccacctgaaggacctagaggaaggcatccaaacgctgatgtgggtgagggtggcaccagggatccccaatcctggggccccactggcttccagggactggggagagaaacactgctgccctctttttagcagtcaggcgctgacccaagagaactcaccgtattcttcatttcccctcgtgaatcctccaggcctttctctacaacctggaggggagggaggaaaatggatgaatgagagagggagggaacagtgcccaagcgcttggcctctccttctcttccttcactttgcagaggctggaagatggcagcccccggactgggcagatcttcaatcagtcctacagcaagtttgacacaaaatcgcacaacgatgacgcactgctcaagaactacgggctgctctactgcttcaggaaggacatggacaaggtcgagacattcctgcgcatcgtgcagtgccgctctgtggagggcagctgtggcttctagctgcccgggtggcatccctgtgacccctccccagtgcctctcctggtcgtggaaggtgctactccagtgcccaccagccttgtcctaataaaattaagttgcatcattt

SEQ ID NO: 243 - DNA, 2725 bp, Homo sapiens
gatggcgccgagccgggtgagcagcgtctcggctgccgctagagttttcctgctccccgcgctcgggtggcgggggcgggtctgagtggtaccccggaggagaccctttgaaggtcccttgtggggactggaaagaggacggttggttgtgtgtctgtgctcgtggggaccccgtgtgtgtgcctgcattggagagatgttgcaggagatggggtgggctctctgaacctcctttcgcgctgcccggggatcttcgacctgcttctctgctgggatctcgcttaagttaacccttccctgggacgccttcctgccgcctccactgatctgaggagatcctgtgactgtagcgtgttttatgagcctttactggcagagggtaccgccgggtattgaaggattcgtaggagttcgccagggaagtgggacacgaccccctcttgtaaacccggcgccaggcacagaggtctccgtctctccaccgggggcttcatccttccagggaggagaagagggactccagaatggctgaggagaagaagctgaagcttagcaacactgtgctgccctcggagtccatgaaggtggtggctgaatccatgggcatcgcccagattcaggaggagacctgccagctgctaacggatgaggtcagctaccgcatcaaagagatcgcacaggatgccttgaagttcatgcacatggggaagcggcagaagctcaccaccagtgacattgactacgccttgaagctaaagaatgtcgagccactctatggcttccacgcccaggagttcattcctttccgcttcgcctctggtgggggccgggagctttacttctatgaggagaaggaggttgatctgagcgacatcatcaatacccctctgccccgggtgcccctggacgtctgcctcaaagctcattggctgagcatcgagggctgccagccagctatccccgagaacccgcccccagctcccaaagagcaacagaaggctgaagccacagaacccctgaagtcagccaagccaggccaggaggaagacggacccctgaagggcaaaggtcaaggggccaccacagccgacggcaaagggaaagagaagaaggcgccgcccttgctggagggggcccccttgcgactgaagccccggagcatccacgagttgtctgtggagcagcagctctactacaaggagatcaccgaggcctgcgtgggctcctgcgaggccaagagggcggaagccctgcaaagcattgccacggaccctggactgtatcagatgctgccacggttcagtacctttatctcggagggggtccgtgtgaacgtggttcagaacaacctggccctactcatctacctgatgcgtatggtgaaagcgctgatggacaaccccacgctctatctagaaaaatacgtccatgagctgattccagctgtgatgacctgcatcgtgagcagacagttgtgcctgcgaccagatgtggacaatcactgggcactccgagactttgctgcccgcctggtggcccagatctgcaagcattttagcacaaccactaacaacatccagtcccggatcaccaagaccttcaccaagagctgggtggacgagaagacgccctggacgactcgttatggctccatcgcaggcttggctgagctgggacacgatgttatcaagactctgattctgccccggctgcagcaggaaggggagcggatccgcagtgtgctggacggccctgtgctgagcaacattgaccggattggagcagaccatgtgcagagcctcctgctgaaacactgtgctcctgttctggcaaagctgcgcccaccgcctgacaatcaggacgcctatcgggcagaattcgggtcccttgggcccctcctctgctcccaggtggtcaaggctcgggcccaggctgctctgcaggctcagcaggtcaacaggaccactctgaccatcacgcagccccggcccacgctgaccctctcgcaggccccacagcctggccctcgcacccctggcttgctgaaggttcctggctccatcgcacttcctgtccagacactggtgtctgcacgagcggctgccccaccacagccttcccctcctccaaccaagtttattgtaatgtcatcgtcctccagcgccccatccacccagcaggtcctgtccctcagcacctcggcccccggctcaggttccaccaccacttcgcccgtcaccaccaccgtccccagcgtgcagcccatcgtcaagttggtctccaccgccaccaccgcaccccccagcactgctccctctggtcctgggagtgtccagaagtacatcgtggtctcacttcccccaacaggggagggcaaaggaggccccacctcccatccttctccagttcctcccccggcatcgtccccgtccccactcagcggcagtgccctttgtggggggaagcaggaggctggggacagtccccctccagctccagggactccaaaagccaatggctcccagcccaactccggctcccctcagcctgctccgtgatgctccacctgccagcccccggattcccacacatgcagacatgtacacacgtgcacgtacacacatgcatgctcgctaagcggaaggaagttgtagattgcttccttcatgtcactttctttttagatattgtacagccagtttctcagaataaaagtttggtttgt

SEQ ID NO: 244 - DNA, 14136 bp, Homo sapiens
gcactgcagcgccagcgtccgagcgggcggccgagctcccggagcggcctggccccgagccccgagcgggcgtcgctcagcagcaggtcgcggccgcgcagccccatccagccccgcgcccgccatgccgtccgcgggccccgcctgagctgcggtctccgcgcgcgggcgggcctggggacggcggggccatgcgcgcgctgccctaacgatgccgcccgccgcgcccgcccgcctggcgctggccctgggcctgggcctgtggctcggggcgctggcggggggccccgggcgcggctgcgggccctgcgagcccccctgcctctgcggcccagcgcccggcgccgcctgccgcgtcaactgctcgggccgcgggctgcggacgctcggtcccgcgctgcgcatccccgcggacgccacagcgctagacgtctcccacaacctgctccgggcgctggacgttgggctcctggcgaacctctcggcgctggcagagctggatataagcaacaacaagatttctacgttagaagaaggaatatttgctaatttatttaatttaagtgaaataaacctgagtgggaacccgtttgagtgtgactgtggcctggcgtggctgccgcgatgggcggaggagcagcaggtgcgggtggtgcagcccgaggcagccacgtgtgctgggcctggctccctggctggccagcctctgcttggcatccccttgctggacagtggctgtggtgaggagtatgtcgcctgcctccctgacaacagctcaggcaccgtggcagcagtgtccttttcagctgcccacgaaggcctgcttcagccagaggcctgcagcgccttctgcttctccaccggccagggcctcgcagccctctcggagcagggctggtgcctgtgtggggcggcccagccctccagtgcctcctttgcctgcctgtccctctgctccggccccccgccacctcctgcccccacctgtaggggccccaccctcctccagcacgtcttccctgcctccccaggggccaccctggtggggccccacggacctctggcctctggccagctagcagccttccacatcgctgccccgctccctgtcactgccacacgctgggacttcggagacggctccgccgaggtggatgccgctgggccggctgcctcgcatcgctatgtgctgcctgggcgctatcacgtgacggccgtgctggccctgggggccggctcagccctgctggggacagacgtgcaggtggaagcggcacctgccgccctggagctcgtgtgcccgtcctcggtgcagagtgacgagagccttgacctcagcatccagaaccgcggtggttcaggcctggaggccgcctacagcatcgtggccctgggcgaggagccggcccgagcggtgcacccgctctgcccctcggacacggagatcttccctggcaacgggcactgctaccgcctggtggtggagaaggcggcctggctgcaggcgcaggagcagtgtcaggcctgggccggggccgccctggcaatggtggacagtcccgccgtgcagcgcttcctggtctcccgggtcaccaggagcctagacgtgtggatcggcttctcgactgtgcagggggtggaggtgggcccagcgccgcagggcgaggccttcagcctggagagctgccagaactggctgcccggggagccacacccagccacagccgagcactgcgtccggctcgggcccaccgggtggtgtaacaccgacctgtgctcagcgccgcacagctacgtctgcgagctgcagcccggaggcccagtgcaggatgccgagaacctcctcgtgggagcgcccagtggggacctgcagggacccctgacgcctctggcacagcaggacggcctctcagccccgcacgagcccgtggaggtcatggtattcccgggcctgcgtctgagccgtgaagccttcctcaccacggccgaatttgggacccaggagctccggcggcccgcccagctgcggctgcaggtgtaccggctcctcagcacagcagggaccccggagaacggcagcgagcctgagagcaggtccccggacaacaggacccagctggcccccgcgtgcatgccagggggacgctggtgccctggagccaacatctgcttgccgctggacgcctcttgccacccccaggcctgcgccaatggctgcacgtcagggccagggctacccggggccccctatgcgctatggagagagttcctcttctccgttgccgcggggccccccgcgcagtactcggtcaccctccacggccaggatgtcctcatgctccctggtgacctcgttggcttgcagcacgacgctggccctggcgccctcctgcactgctcgccggctcccggccaccctggtccccaggccccgtacctctccgccaacgcctcgtcatggctgccccacttgccagcccagctggagggcacttgggcctgccctgcctgtgccctgcggctgcttgcagccacggaacagctcaccgtgctgctgggcttgaggcccaaccctggactgcggatgcctgggcgctatgaggtccgggcagaggtgggcaatggcgtgtccaggcacaacctctcctgcagctttgacgtggtctccccagtggctgggctgcgggtcatctaccctgccccccgcgacggccgcctctacgtgcccaccaacggctcagccttggtgctccaggtggactctggtgccaacgccacggccacggctcgctggcctgggggcagtgtcagcgcccgctttgagaatgtctgccctgccctggtggccaccttcgtgcccggctgcccctgggagaccaacgataccctgttctcagtggtagcactgccgtggctcagtgagggggagcacgtggtggacgtggtggtggaaaacagcgccagccgggccaacctcagcctgcgggtgacggcggaggagcccatctgtggcctccgcgccacgcccagccccgaggcccgtgtactgcagggagtcctagtgaggtacagccccgtggtggaggccggctcggacatggtcttccggtggaccatcaacgacaagcagtccctgaccttccagaacgtggtcttcaatgtcatttatcagagcgcggcggtcttcaagctctcactgacggcctccaaccacgtgagcaacgtcaccgtgaactacaacgtaaccgtggagcggatgaacaggatgcagggtctgcaggtctccacagtgccggccgtgctgtcccccaatgccacgctagcactgacggcgggcgtgctggtggactcggccgtggaggtggccttcctgtggaactttggggatggggagcaggccctccaccagttccagcctccgtacaacgagtccttcccggttccagacccctcggtggcccaggtgctggtggagcacaatgtcatgcacacctacgctgccccaggtgagtacctcctgaccgtgctggcatctaatgccttcgagaacctgacgcagcaggtgcctgtgagcgtgcgcgcctccctgccctccgtggctgtgggtgtgagtgacggcgtcctggtggccggccggcccgtcaccttctacccgcacccgctgccctcgcctgggggtgttctttacacgtgggacttcggggacggctcccctgtcctgacccagagccagccggctgccaaccacacctatgcctcgaggggcacctaccacgtgcgcctggaggtcaacaacacggtgagcggtgcggcggcccaggcggatgtgcgcgtctttgaggagctccgcggactcagcgtggacatgagcctggccgtggagcagggcgcccccgtggtggtcagcgccgcggtgcagacgggcgacaacatcacgtggaccttcgacatgggggacggcaccgtgctgtcgggcccggaggcaacagtggagcatgtgtacctgcgggcacagaactgcacagtgaccgtgggtgcggccagccccgccggccacctggcccggagcctgcacgtgctggtcttcgtcctggaggtgctgcgcgttgaacccgccgcctgcatccccacgcagcctgacgcgcggctcacggcctacgtcaccgggaacccggcccactacctcttcgactggaccttcggggatggctcctccaacacgaccgtgcgggggtgcccgacggtgacacacaacttcacgcggagcggcacgttccccctggcgctggtgctgtccagccgcgtgaacagggcgcattacttcaccagcatctgcgtggagccagaggtgggcaacgtcaccctgcagccagagaggcagtttgtgcagctcggggacgaggcctggctggtggcatgtgcctggcccccgttcccctaccgctacacctgggactttggcaccgaggaagccgcccccacccgtgccaggggccctgaggtgacgttcatctaccgagacccaggctcctatcttgtgacagtcaccgcgtccaacaacatctctgctgccaatgactcagccctggtggaggtgcaggagcccgtgctggtcaccagcatcaaggtcaatggctcccttgggctggagctgcagcagccgtacctgttctctgctgtgggccgtgggcgccccgccagctacctgtgggatctgggggacggtgggtggctcgagggtccggaggtcacccacgcttacaacagcacaggtgacttcaccgttagggtggccggctggaatgaggtgagccgcagcgaggcctggctcaatgtgacggtgaagcggcgcgtgcgggggctcgtcgtcaatgcaagccgcacggtggtgcccctgaatgggagcgtgagcttcagcacgtcgctggaggccggcagtgatgtgcgctattcctgggtgctctgtgaccgctgcacgcccatccctgggggtcctaccatctcttacaccttccgctccgtgggcaccttcaatatcatcgtcacggctgagaacgaggtgggctccgcccaggacagcatcttcgtctatgtcctgcagctcatagaggggctgcaggtggtgggcggtggccgctacttccccaccaaccacacggtacagctgcaggccgtggttagggatggcaccaacgtctcctacagctggactgcctggagggacaggggcccggccctggccggcagcggcaaaggcttctcgctcaccgtgctcgaggccggcacctaccatgtgcagctgcgggccaccaacatgctgggcagcgcctgggccgactgcaccatggacttcgtggagcctgtggggtggctgatggtgaccgcctccccgaacccagctgccgtcaacacaagcgtcaccctcagtgccgagctggctggtggcagtggtgtcgtatacacttggtccttggaggaggggctgagctgggagacctccgagccatttaccacccatagcttccccacacccggcctgcacttggtcaccatgacggcagggaacccgctgggctcagccaacgccaccgtggaagtggatgtgcaggtgcctgtgagtggcctcagcatcagggccagcgagcccggaggcagcttcgtggcggccgggtcctctgtgcccttttgggggcagctggccacgggcaccaatgtgagctggtgctgggctgtgcccggcggcagcagcaagcgtggccctcatgtcaccatggtcttcccggatgctggcaccttctccatccggctcaatgcctccaacgcagtcagctgggtctcagccacgtacaacctcacggcggaggagcccatcgtgggcctggtgctgtgggccagcagcaaggtggtggcgcccgggcagctggtccattttcagatcctgctggctgccggctcagctgtcaccttccgcctgcaggtcggcggggccaaccccgaggtgctccccgggccccgtttctcccacagcttcccccgcgtcggagaccacgtggtgagcgtgcggggcaaaaaccacgtgagctgggcccaggcgcaggtgcgcatcgtggtgctggaggccgtgagtgggctgcagatgcccaactgctgcgagcctggcatcgccacgggcactgagaggaacttcacagcccgcgtgcagcgcggctctcgggtcgcctacgcctggtacttctcgctgcagaaggtccagggcgactcgctggtcatcctgtcgggccgcgacgtcacctacacgcccgtggccgcggggctgttggagatccaggtgcgcgccttcaacgccctgggcagtgagaaccgcacgctggtgctggaggttcaggacgccgtccagtatgtggccctgcagagcggcccctgcttcaccaaccgctcggcgcagtttgaggccgccaccagccccagcccccggcgtgtggcctaccactgggactttggggatgggtcgccagggcaggacacagatgagcccagggccgagcactcctacctgaggcctggggactaccgcgtgcaggtgaacgcctccaacctggtgagcttcttcgtggcgcaggccacggtgaccgtccaggtgctggcctgccgggagccggaggtggacgtggtcctgcccctgcaggtgctgatgcggcgatcacagcgcaactacttggaggcccacgttgacctgcgcgactgcgtcacctaccagactgagtaccgctgggaggtgtatcgcaccgccagctgccagcggccggggcgcccagcgcgtgtggccctgcccggcgtggacgtgagccggcctcggctggtgctgccgcggctggcgctgcctgtggggcactactgctttgtgtttgtcgtgtcatttggggacacgccactgacacagagcatccaggccaatgtgacggtggcccccgagcgcctggtgcccatcattgagggtggctcataccgcgtgtggtcagacacacgggacctggtgctggatgggagcgagtcctacgaccccaacctggaggacggcgaccagacgccgctcagtttccactgggcctgtgtggcttcgacacagagggaggctggcgggtgtgcgctgaactttgggccccgcgggagcagcacggtcaccattccacgggagcggctggcggctggcgtggagtacaccttcagcctgaccgtgtggaaggccggccgcaaggaggaggccaccaaccagacggtgctgatccggagtggccgggtgcccattgtgtccttggagtgtgtgtcctgcaaggcacaggccgtgtacgaagtgagccgcagctcctacgtgtacttggagggccgctgcctcaattgcagcagcggctccaagcgagggcggtgggctgcacgtacgttcagcaacaagacgctggtgctggatgagaccaccacatccacgggcagtgcaggcatgcgactggtgctgcggcggggcgtgctgcgggacggcgagggatacaccttcacgctcacggtgctgggccgctctggcgaggaggagggctgcgcctccatccgcctgtcccccaaccgcccgccgctggggggctcttgccgcctcttcccactgggcgctgtgcacgccctcaccaccaaggtgcacttcgaatgcacgggctggcatgacgcggaggatgctggcgccccgctggtgtacgccctgctgctgcggcgctgtcgccagggccactgcgaggagttctgtgtctacaagggcagcctctccagctacggagccgtgctgcccccgggtttcaggccacacttcgaggtgggcctggccgtggtggtgcaggaccagctgggagccgctgtggtcgccctcaacaggtctttggccatcaccctcccagagcccaacggcagcgcaacggggctcacagtctggctgcacgggctcaccgctagtgtgctcccagggctgctgcggcaggccgatccccagcacgtcatcgagtactcgttggccctggtcaccgtgctgaacgagtacgagcgggccctggacgtggcggcagagcccaagcacgagcggcagcaccgagcccagatacgcaagaacatcacggagactctggtgtccctgagggtccacactgtggatgacatccagcagatcgctgctgcgctggcccagtgcatggggcccagcagggagctcgtatgccgctcgtgcctgaagcagacgctgcacaagctggaggccatgatgctcatcctgcaggcagagaccaccgcgggcaccgtgacgcccaccgccatcggagacagcatcctcaacatcacaggagacctcatccacctggccagctcggacgtgcgggcaccacagccctcagagctgggagccgagtcaccatctcggatggtggcgtcccaggcctacaacctgacctctgccctcatgcgcatcctcatgcgctcccgcgtgctcaacgaggagcccctgacgctggcgggcgaggagatcgtggcccagggcaagcgctcggacccgcggagcctgctgtgctatggcggcgccccagggcctggctgccacttctccatccccgaggctttcagcggggccctggccaacctcagtgacgtggtgcagctcatctttctggtggactccaatccctttccctttggctatatcagcaactacaccgtctccaccaaggtggcctcgatggcattccagacacaggccggcgcccagatccccatcgagcggctggcctcagagcgcgccatcaccgtgaaggtgcccaacaactcggactgggctgcccggggccaccgcagctccgccaactccgccaactccgttgtggtccagccccaggcctccgtcggtgctgtggtcaccctggacagcagcaaccctgcggccgggctgcatctgcagctcaactatacgctgctggacggccactacctgtctgaggaacctgagccctacctggcagtctacctacactcggagccccggcccaatgagcacaactgctcggctagcaggaggatccgcccagagtcactccagggtgctgaccaccggccctacaccttcttcatttccccggggagcagagacccagcggggagttaccatctgaacctctccagccacttccgctggtcggcgctgcaggtgtccgtgggcctgtacacgtccctgtgccagtacttcagcgaggaggacatggtgtggcggacagaggggctgctgcccctggaggagacctcgccccgccaggccgtctgcctcacccgccacctcaccgccttcggcgccagcctcttcgtgcccccaagccatgtccgctttgtgtttcctgagccgacagcggatgtaaactacatcgtcatgctgacatgtgctgtgtgcctggtgacctacatggtcatggccgccatcctgcacaagctggaccagttggatgccagccggggccgcgccatccctttctgtgggcagcggggccgcttcaagtacgagatcctcgtcaagacaggctggggccggggctcaggtaccacggcccacgtgggcatcatgctgtatggggtggacagccggagcggccaccggcacctggacggcgacagagccttccaccgcaacagcctggacatcttccggatcgccaccccgcacagcctgggtagcgtgtggaagatccgagtgtggcacgacaacaaagggctcagccctgcctggttcctgcagcacgtcatcgtcagggacctgcagacggcacgcagcgccttcttcctggtcaatgactggctttcggtggagacggaggccaacgggggcctggtggagaaggaggtgctggccgcgagcgacgcagcccttttgcgcttccggcgcctgctggtggctgagctgcagcgtggcttctttgacaagcacatctggctctccatatgggaccggccgcctcgtagccgtttcactcgcatccagagggccacctgctgcgttctcctcatctgcctcttcctgggcgccaacgccgtgtggtacggggctgttggcgactctgcctacagcacggggcatgtgtccaggctgagcccgctgagcgtcgacacagtcgctgttggcctggtgtccagcgtggttgtctatcccgtctacctggccatcctttttctcttccggatgtcccggagcaaggtggctgggagcccgagccccacacctgccgggcagcaggtgctggacatcgacagctgcctggactcgtccgtgctggacagctccttcctcacgttctcaggcctccacgctgaggcctttgttggacagatgaagagtgacttgtttctggatgattctaagagtctggtgtgctggccctccggcgagggaacgctcagttggccggacctgctcagtgacccgtccattgtgggtagcaatctgcggcagctggcacggggccaggcgggccatgggctgggcccagaggaggacggcttctccctggccagcccctactcgcctgccaaatccttctcagcatcagatgaagacctgatccagcaggtccttgccgagggggtcagcagcccagcccctacccaagacacccacatggaaacggacctgctcagcagcctgtccagcactcctggggagaagacagagacgctggcgctgcagaggctgggggagctggggccacccagcccaggcctgaactgggaacagccccaggcagcgaggctgtccaggacaggactggtggagggtctgcggaagcgcctgctgccggcctggtgtgcctccctggcccacgggctcagcctgctcctggtggctgtggctgtggctgtctcagggtgggtgggtgcgagcttccccccgggcgtgagtgttgcgtggctcctgtccagcagcgccagcttcctggcctcattcctcggctgggagccactgaaggtcttgctggaagccctgtacttctcactggtggccaagcggctgcacccggatgaagatgacaccctggtagagagcccggctgtgacgcctgtgagcgcacgtgtgccccgcgtacggccaccccacggctttgcactcttcctggccaaggaagaagcccgcaaggtcaagaggctacatggcatgctgcggagcctcctggtgtacatgctttttctgctggtgaccctgctggccagctatggggatgcctcatgccatgggcacgcctaccgtctgcaaagcgccatcaagcaggagctgcacagccgggccttcctggccatcacgcggtctgaggagctctggccatggatggcccacgtgctgctgccctacgtccacgggaaccagtccagcccagagctggggcccccacggctgcggcaggtgcggctgcaggaagcactctacccagaccctcccggccccagggtccacacgtgctcggccgcaggaggcttcagcaccagcgattacgacgttggctgggagagtcctcacaatggctcggggacgtgggcctattcagcgccggatctgctgggggcatggtcctggggctcctgtgccgtgtatgacagcgggggctacgtgcaggagctgggcctgagcctggaggagagccgcgaccggctgcgcttcctgcagctgcacaactggctggacaacaggagccgcgctgtgttcctggagctcacgcgctacagcccggccgtggggctgcacgccgccgtcacgctgcgcctcgagttcccggcggccggccgcgccctggccgccctcagcgtccgcccctttgcgctgcgccgcctcagcgcgggcctctcgctgcctctgctcacctcggtgtgcctgctgctgttcgccgtgcacttcgccgtggccgaggcccgtacttggcacagggaagggcgctggcgcgtgctgcggctcggagcctgggcgcggtggctgctggtggcgctgacggcggccacggcactggtacgcctcgcccagctgggtgccgctgaccgccagtggacccgtttcgtgcgcggccgcccgcgccgcttcactagcttcgaccaggtggcgcagctgagctccgcagcccgtggcctggcggcctcgctgctcttcctgcttttggtcaaggctgcccagcagctacgcttcgtgcgccagtggtccgtctttggcaagacattatgccgagctctgccagagctcctgggggtcaccttgggcctggtggtgctcggggtagcctacgcccagctggccatcctgctcgtgtcttcctgtgtggactccctctggagcgtggcccaggccctgttggtgctgtgccctgggactgggctctctaccctgtgtcctgccgagtcctggcacctgtcacccctgctgtgtgtggggctctgggcactgcggctgtggggcgccctacggctgggggctgttattctccgctggcgctaccacgccttgcgtggagagctgtaccggccggcctgggagccccaggactacgagatggtggagttgttcctgcgcaggctgcgcctctggatgggcctcagcaaggtcaaggagttccgccacaaagtccgctttgaagggatggagccgctgccctctcgctcctccaggggctccaaggtatccccggatgtgcccccacccagcgctggctccgatgcctcgcacccctccacctcctccagccagctggatgggctgagcgtgagcctgggccggctggggacaaggtgtgagcctgagccctcccgcctccaagccgtgttcgaggccctgctcacccagtttgaccgactcaaccaggccacagaggacgtctaccagctggagcagcagctgcacagcctgcaaggccgcaggagcagccgggcgcccgccggatcttcccgtggcccatccccgggcctgcggccagcactgcccagccgccttgcccgggccagtcggggtgtggacctggccactggccccagcaggacaccccttcgggccaagaacaaggtccaccccagcagcacttagtcctccttcctggcgggggtgggccgtggagtcggagtggacaccgctcagtattactttctgccgctgtcaaggccgagggccaggcagaatggctgcacgtaggttccccagagagcaggcaggggcatctgtctgtctgtgggcttcagcactttaaagaggctgtgtggccaaccaggacccagggtcccctccccagctcccttgggaaggacacagcagtattggacggtttctagcctctgagatgctaatttatttccccgagtcctcaggtacagcgggctgtgcccggccccaccccctgggcagatgtcccccactgctaaggctgctggcttcagggagggttagcctgcaccgccgccaccctgcccctaagttattacctctccagttcctaccgtactccctgcaccgtctcactgtgtgtctcgtgtcagtaatttatatggtgttaaaatgtgtatatttttgtatgtcactattttcactagggctgaggggcctgcgcccagagctggcctcccccaacacctgctgcgcttggtaggtgtggtggcgttatggcagcccggctgctgcttggatgcgagcttggccttgggccggtgctgggggcacagctgtctgccaggcactctcatcaccccagaggccttgtcatcctcccttgccccaggccaggtagcaagagagcagcgcccaggcctgctggcatcaggtctgggcaagtagcaggactaggcatgtcagaggaccccagggtggttagaggaaaagactcctcctgggggctggctcccagggtggaggaaggtgactgtgtgtgtgtgtgtgtgcgcgcgcgacgcgcgagtgtgctgtatggcccaggcagcctcaaggccctcggagctggctgtgcctgcttctgtgtaccacttctgtgggcatggccgcttctagagcctcgacacccccccaacccccgcaccaagcagacaaagtcaataaaagagctgtctgactgc

SEQ ID NO: 245 - DNA, 3880 bp, Homo sapiens
gctcgagtgccaaagctggggttctacttgagatttccctcgtggtgccagggtccggcgagcatcacgccgaggcccattttccagacgaccacgacgaggccggggtcacgaactctggcgccccttaccagcttccagtctctcgaggtggccagtgtggtgcttggtccttgtttccaggatggacttccccagctccctccgccctgcgttgtttctgaccggcccccttggtctgagcgacgtccctgacctctctttcatgtgcagctggcgagacgcactgactctgccagaggcccagccccagaactcagagaatggggcactgcatgtgaccaaggacctgctgtgggagccggcaacccctgggcctctccccatgctgcctcccctcatcgatccctgggaccctggcctgactgcccgggacctgcttttccgcggagggtaccggtatcggaagcggccccgagtcgtgctggatgtgactgagcagatcagccggttcctcttggatcatggagacgtagcctttgcgcccctggggaagctgatgctggagaatttcaagctggagggagcggggagccgcactaagaagaagacagtggtcagtgtgaagaagctgctccaggacctcggtggacaccagccctgggggtgtccctgggcttacctcagcaaccgacagcgccgcttctctatcctcgggggccccatcctgggcacgtcggtggcgagccacttggcagagctgctgcacgaggagctggtgctgcggtgggagcagctgcttctggatgaggcctgcactgggggcgcgctggcctgggttcctggaaggacaccccagttcgggcagctggtctaccctgctggaggcgcccaggacaggctgcatttccaagaggtcgttctgaccccaggtgacaatccccaattccttgggaaacctggacgcatccagctccagggacctgtccggcaagtggtgacatgcaccgtccagggagaaagtaaggcccttatatacactttcctccctcactggctgacctgctacctgacccctggccctttccatccctcctcagctctgctggccgtccgctctgactaccactgtgccgtgtggaagtttggtaaacagtggcagccaacccttctgcaggcgatgcaggtggagaaaggggccacggggatcagcctcagccctcacctgcccggggagctggccatctgcagccgctcgggagccgtctgcctgtggagccctgaggatgggctgcggcaaatctacagggaccctgagaccctcgtgttccgggactcctcttcgtggcgttgggcagacttcactgcgcaccctcgggtgctgaccgtgggtgaccgcaccggagtgaagatgctggacactcagggcccgccgggctgtggtctgttgctttttcgtttgggggcagaggcttcgtgccagaaaggggaacgtgtcctgcttacccagtacctggggcactccagccccaaatgcctcccccctactcttcatctcgtctgtacccagttctctctctacctagtggacgagcgccttcccctggtgccgatgctgaagtggaaccatggcctcccctccccgctcctgctggcccgactgctgcctccgccccggcccagctgcgtgcagcccctgctcctcggaggccagggtgggcagctgcagctgctgcacctggcaggagaaggggcgtcggtgccccgcctggcaggccccccccagtctcttccttccaggatcgactccctccctgcatttcctctgctggagcctaagatccagtggcggctgcaggagcgcctgaaagcaccgaccataggtctggctgccgtcgtcccgcccttgccctcagcgcccacaccaggcctggtgctcttccagctctcggcggcgggagatgtcttctaccagcagctccgcccccaggtggactccagcctccgcagagatgctgggcctcctggcgacacccaacctgactgccatgcccccacagcttcctggacctcccaggacactgccggctgcagccagtggctgaaggccctgctaaaagtgcccctggctcctcctgtgtggacagcacccaccttcacccaccgccagatgctgggcagcacagagctgcggagggaggaagaggaagggcagcggctgggtgtgctccgcaaggccatggcccgagggcagctcctgctgcagagagacctgggctccctccctgcggcagagccaccccctgcacccgagtcaggcctagaggacaagctcagtgagcgcctgggggaagcctgggcaggccgaggggctgcctggtgggagaggcagcagggcaggacctcggagcccgggagacagaccaggcggcccaagcgccggacccagctgtccagcagcttttcgctcagtggccatgtggatccgtcagaggacaccagctcccctcatagccctgagtggccacctgctgatgctctgcccctgccccccacgaccccgccctcccaggagttgactccggatgcatgcgcccagggcgtcccatcagagcagcggcagatgctccgtgactacatggccaagctaccaccccagagggacaccccaggctgtgccaccacacctccccactcccaggcctccagcgtccgggccactcgctcccagcagcacacacccgtcctctctagctctcagcccctccggaagaagcctcgaatgggcttctgaggacacaaggtgggctgccctcaagccccagagagcccctcatccttcctctgggaccagatgtgccttccacagttgaaacttgagaagcagagctcgccaccttctggaggccactgtgatgatgagccaagcaatttggagccaagttgaagggacagggcaacaaaatacagtagtagtttcttttgtattttgtatattcgcctgaagatcatcccgcaaggcaggctggaggtgccggtgggcctgtgttgctgggattttagtctgtgctgggaggcagggctccgtgcgcctcagctgtgggggcctcaggcaggtccctcagttctcacgccttcctgtccagtggaatgggggccaggagtgctggctcctcgtgtttggtgagggtggagtgaggcccctgcagagctgctgatgaggtgggcacagcggccgttggcagctgctgttgtgggttgctttgtcaatctctgccccggtctgatgtttcctacagggagatgccgtggatccaggttcagggactaaatacacttggcagctgaagatgaattggaatggtcacgttttttaggctggacagcgtcccgccacagctactacctgacactgagctcatgcagagagatgatggctgatgttccttctcccttgggacatgggtctggcacctgtgggctgtcgatagtgccctctgagcagagggtcacggtcatgtcagtttgggggaattctctgttgtgcctcagagactcccccctttctttcctccctccccttctcattttgatgtctaaagcatcaagtccctcttcctcagagtttctctagctgcagtggaagattctgttttcctgtggggaaaatgctcacttgagattttgcagggacccgggtctgtctggtttctgatgacatagtaagagaaaggtcttttttcaggttggctggtgaaaggaattgcatgtgactcacacaaacaggagctagcccaatcatacactgactcgcgtgggtgtttaaatgtttatcatgcctaagggagacatttataattaaaccatttatgctacataa

SEQ ID NO: 246 - DNA, 2146 bp, Homo sapiens
tactcccggagtcactcatcccttaagcaagcagggtggggttaggtgcgcgtgcgcggttttaatactcctccccgaactgccaactcttcacgcacgcgaagtaggccccaccctggctgggtttacgcgtgcgcactaacgggcctggtcccggaagaccacacgcgtgcgtggtggggactacggtgacagtaccccgggtggggcgagggccagtcatggcggagtcctggtctgggcaggccttgcaggctctgccggccacggtgctgggcgcgctgggcagcgagttcttgcgggagtgggaggcgcaggacatgcgcgtgaccctcttcaagctgctgctgctgtggttggtgttaagtctcctgggcatccagctggcgtgggggttctacgggaatacagtgaccgggttgtatcaccgtccaggtctgggtggtcagaatggatccacgcctgatggctccacgcatttcccttcgtgggaaatggcagcaaacgaacctctcaaaacccacagagaataagggaaggcagcagagggtctccaagggcatcactgggtctgctggcttctacactgggttctgctactccccagacctcagggacaactgccgggggttcagggttggtagcagggagtacccagtgcctacagggctgggcctcttctgcctcttaagcctgctccctcacccaggcactgggcaagtgaagagtttgcctgtactcttatctgggtgccttaaggagagagattgtgttcttcctctctcaggggtgataactcaggaagcctctgggttgggaagaccatcagttcttttgtcttaggtttcttttcctgtccctcttccatccccaagatgtgaccccataaaaatttttcctgagttggccaggcatggtggctcacgcctgtaatcccaacactttgggaggctgaggcaggcagatcacgaggtcaggagttcgagaccagcctgaccaacatggtgaaaaccccatctctactaaaaatacaaaaattagccgggtgtggtggcacacaccagtaatcccagctactcgggaggctgaagcaggagatttgcttgaacctgggaggcagaggttgcagtgagccaagattgcgccgttgtactccagcctgggcaacagagcaagacccatctcaaaaaaaaaatttttttcctgagaggaagcctgaggttgaccagctctggggtttgtaaggcaggtctgttttctcctaggccctgagttttctgaatctctggttttgctttgttggcaaggagccagggaatcctgacctgagccagaccttaagctctatggttatttagctggccattcaggtataaggcagggtggtgtacctgctggcactatccagatggaggcaccaaacacccacatacctggcccaaccagacttctcccgtgagccaggcaaaggaaattgtcatctgccaactgtcctactcatattcctctcagtccttcttgggggtaagctgattacctgaaggacagctgaacccctggggtagcctcctatccaccactgcttaagtgcctatgggaatgtgggtctgcaccttgtcccctcataggatggtaccaagcatttagtgcacagtggccccatcatagcctgcagcctcatcatttcccatctggacctggtacaaatgcacgtcacaggctcagctcctccccactagcatcttctctaccttcaagaaccaggcagccctgccatgtcacaataggccaggggagtttccaaagatgtgggtggcaaatgcccctatagaaacaccagtacctgaaagcactgtagccctggacctgcctccttccctcggggccatacttctgtttccatctgctgggccaccagccactttagtgacccctgcctacttccttcctgttggatatcatacttccatctggctgcctttgcttaagccatctttgtggtagaggggccctggaattgcagctgtactgaggatgatgttattcacagcccctggcccacccactaatactactgcacagagtcaggatctcacatttcaccccaggctcaactgaggatgtggcttattaaacacggaagtgc

SEQ ID NO: 247 - DNA, 423 bp, Homo sapiens
ccggaagtgactgcggacgaatcggcgtttgccgaggctggcatagatttggctgtctccgctcatagctgcttttggcgcgaaagatgccgggtctggttgactcaaaccctgccccgcctgagtctcaggagaagaagccgctgaagccctgctgcgcttgcccggagaccaagaaggcgcgcgatgcgtgtatcatcgagaaaggagaagaacactgtggacatctaattgaggcccacaaggaatgcatgagagccctaggatttaaaatatgaaatggtggtctgctgtgtgaataaataattcctgaagaatgaagaagattaattttgggagttctttgacgaactttgatatgtggaaaaagtatttataatttattgtaagaagaaagtaaaatattactagtggaagatcttc

SEQ ID NO: 248 - DNA, 2267 bp, Homo sapiens
ggtagtagcaaatattcaaatgagaacagcttgaagaccgttcatttttaagtgacaagagactcacctccaagaagcaattgtgttttcagaatgattttattcaagcaagcaacttatttcatttccttgtttgctacagtttcctgtggatgtctgactcaactctatgaaaacgccttcttcagaggtggggatgtagcttccatgtacaccccaaatgcccaatactgccagatgaggtgcacattccacccaaggtgtttgctattcagttttcttccagcaagttcaatcaatgacatggagaaaaggtttggttgcttcttgaaagatagtgttacaggaaccctgccaaaagtacatcgaacaggtgcagtttctggacattccttgaagcaatgtggtcatcaaataagtgcttgccatcgagacatttataaaggagttgatatgagaggagtcaattttaatgtgtctaaggttagcagtgttgaagaatgccaaaaaaggtgcaccaataacattcgctgccagtttttttcatatgccacgcaaacatttcacaaggcagagtaccggaacaattgcctattaaagtacagtcccggaggaacacctaccgctataaaggtgctgagtaacgtggaatctggattctcactgaagccctgtgccctttcagaaattggttgccacatgaacatcttccagcatcttgcgttctcagatgtggatgttgccagggttctcactccagatgcttttgtgtgtcggaccatctgcacctatcaccccaactgcctcttctttacattctatacaaatgtatggaaaatcgagtcacaaagaaatgtttgtcttcttaaaacatctgaaagtggcacaccaagttcctctactcctcaagaaaacaccatatctggatatagccttttaacctgcaaaagaactttacctgaaccctgccattctaaaatttacccgggagttgactttggaggagaagaattgaatgtgacttttgttaaaggagtgaatgtttgccaagagacttgcacaaagatgattcgctgtcagtttttcacttattctttactcccagaagactgtaaggaagagaagtgtaagtgtttcttaagattatctatggatggttctccaactaggattgcgtatgggacacaagggagctctggttactctttgagattgtgtaacactggggacaactctgtctgcacaacaaaaacaagcacacgcattgttggaggaacaaactcttcttggggagagtggccctggcaggtgagcctgcaggtgaagctgacagctcagaggcacctgtgtggagggtcactcataggacaccagtgggtcctcactgctgcccactgctttgatgggcttcccctgcaggatgtttggcgcatctatagtggcattttaaatctgtcagacattacaaaagatacacctttctcacaaataaaagagattattattcaccaaaactataaagtctcagaagggaatcatgatatcgccttgataaaactccaggctcctttgaattacactgaattccaaaaaccaatatgcctaccttccaaaggtgacacaagcacaatttataccaactgttgggtaaccggatggggcttctcgaaggagaaaggtgaaatccaaaatattctacaaaaggtaaatattcctttggtaacaaatgaagaatgccagaaaagatatcaagattataaaataacccaacggatggtctgtgctggctataaagaagggggaaaagatgcttgtaagggagattcaggtggtcccttagtttgcaaacacaacggaatgtggcgtttggtgggcatcacaagctggggtgaaggctgtgcccgcagggagcaacctggtgtctacaccaaagtcgctgagtacatggactggattttagagaaaacacagagcagtgatggaaaagctcagatgcagtcaccagcatgagaagcagtccagagtctaggcaatttttacaacctgagttcaagtcaaattctgagcctggggggtcctcatctgcaaagcatggagagtggcatcttctttgcatcctaaggacgaaagacacagtgcactcagagctgctgaggacaatgtctgctgaagcccgctttcagcacgccgtaaccaggggctgacaatgcgaggtcgcaactgagatctccatgactgtgtgttgtgaaataaaatggtgaaagatc

SEQ ID NO: 249 - DNA, 2595 bp, Homo sapiens
  misc_feature (1)...(2595): n=a,t,g or c
tctagaccaccagcctggacaacataccaagaccctgtctctacaaataaatagataaataaatagacactttttttaagtgtcaaaagtgcttggcacttagtagaccatcagtgttaggtgctcatacataccccgattattgccttgtcccagtgtcttgtacaggggttggagagnaggtgttaagaaatgaccgaatgggtaaatggatgaacagaacacctccctccagagcccacatgctcgtgggcctctgggaccactctcctcctcctcttgcttccctgagctcccccagcatggcctctgtccaggccttgcgctgcctccaggcctttgctgtggctactgcccctggagcgccatntccacagctcctcctgtggctggctcctcatcacccagatgacctggtgggtgaggccacctagcaaggagtcatgcctgtcctgccttctgactcactctctcatcaccctgccttttttttcttttgtggctcacgtgtttgcatgtctccccccatgaggcagggggccatgtgtgtcttattcacttctgtagccacagcaccctgagcaatgcttgccacatagtaggtgctcaattaatgttgaatgaatgggcaaaatgcgggatggcgggacagagttctctcaaggcattctgccagagaatgtccctctgtcaccttgaatccagtgtacctccagatgactcccccattccctcctgtagttcatgcttttctctccccttcctccccagacacggcctacccacccctggcaaccaacatggccaacttcacacctgtcaatggcagctcgggcaatcagtccgtgcgcctggtcacgtcatcatcccacaatcgctatgagacggtggaaatggtcttcattgccacagtgacaggctccctgagcctggtgactgtcgtgggcaacatcctggtgatgctgtccatcaaggtcaacaggcagctgcagacagtcaacaactacttcctcttcagcctggcgtgtgctgatctcatcataggcgccttctccatgaacctctacaccgtgtacatcatcaagggctactggcccctgggcgccgtggtctgcgacctgtggctggccctggactacgtggtgagcaacgcctccgtcatgaaccttctcatcatcagctttgaccgctacttctgcgtcaccaagcctctcacctaccctgcccggcgcaccaccaagatggcaggcctcatgattgctgctgcctgggtactgtccttcgtgctctgggcgcctgccatcttgttctggcagtttgtggtgggtaagcggacggtgcccgacaaccactgcttcatccagttcctgtccaacccagcagtgacctttggcacagccattgctgccttctacctgcctgtggtcatcatgacggtgctgtacatccacatctccctggccagtcgcagccgagtccacaagcaccggcccgagggcccgaaggagaagaaagccaagacgctggccttcctcaagagcccactaatgaagcagagcgtcaagaagccccgcccgggaggccgcccgggaggactgcgcaatggcaagctggaggaggcccccccgccagcgctgccaccgccaccgcgccccgtggctgataaggacacttccaatgagtccagctcaggcagtgccacccagaacaccaaggaacgcccagccacagagctgtccaccacagaggccaccactcccgccatgcccgcccctcccctgcagccgcgggccctcaacccagcctccagatggtccaagatccagattgtgacgaagcagacaggcaatgagtgtgtgacagccattgagattgtgcctgccacgccggctggcatgcgccctgcggccaacgtggcccgcaagttcgccagcatcgctcgcaaccaggtgcgcaagaagcggcagatggcggcccgggagcgcaaagtgacacgaacgatctttgccattctgctagccttcatcctcacctggacgccctacaacgtcatggtcctggtgaacaccttctgccagagctgcatccctgacacggtgtggtccattggctactggctctgctacgtcaacagcaccatcaaccctgcctgctatgctctgtgcaacgccacctttaaaaagaccttccggcacctgctgctgtgccagtatcggaacatcggcactgccaggtaggcaggcaggagtgccctaggaggtgcggtgtgcgtgcgtgtgctgggggaccacacggctcacttgctgtggggaagagtgcaggcaccattctgcgttcacgtttgctgaggaggaagttcagaagaggctctgtggctgcattcagagaccagatctctgctcacccgtgaggaggctcaccccagggagtgtctgaactggggctgcctggcccacctctgtggccctgcttcagcgagctgcggggcactggcctgggtgggcacctgcccactgtgaccaaccatcagcagtgctggaagaatggagatctggatgggggccgaagcccagggccccctcaggaagaacaaag

SEQ ID NO: 250 - DNA, 1923 bp, Homo sapiens
gctgagcatcgccagggcgggcggcagggcgcggcctctccgccgggtgtacctcctgtcgcggcgcgagacctctggtgaaagaaaagatgttgtcccggttaagagtagtttccaccacttgtactttggcatgtcgacatttgcacataaaagaaaaaggcaagccacttatgctgaacccaagaacaaacaagggaatggcatttactttacaagaacgacaaatgcttggtcttcaaggacttctacctcccaaaatagagacacaagatattcaagccttacgatttcatagaaacttgaagaaaatgactagccctttggaaaaatatatctacataatgggaatacaagaaagaaatgagaaattgttttatagaatactgcaagatgacattgagagtttaatgccaattgtatatacaccgacggttggtcttgcctgctcccagtatggacacatctttagaagacctaagggattatttatttcgatctcagacagaggtcatgttagatcaattgtggataactggccagaaaatcatgttaaggctgttgtagtgactgatggagagagaattctgggtcttggagatctgggtgtctatggaatgggaattccagtaggaaaactttgtttgtatacagcttgtgcaggaatacggcctgatagatgcctgccagtgtgtattgatgtgggaactgataatatcgcactcttaaaagacccattttacatgggcttgtaccagaaacgagatcgcacacaacagtatgatgacctgattgatgagtttatgaaagctattactgacagatatggccggaacacactcattcagttcgaagactttggaaatcataatgcattcaggttcttgagaaagtaccgagaaaaatattgtactttcaatgatgatattcaagggacagctgcagtagctctagcaggtcttcttgcagcacaaaaagttattagtaaaccaatctccgaacacaaaatcttattccttggagcaggagaggctgctcttggaattgcaaatcttatagttatgtctatggtagaaaatggcctgtcagaacaagaggcacaaaagaaaatctggatgtttgacaagtatggtttattagttaagggacggaaagcaaaaatagatagttatcaggaaccatttactcactcagccccagagagcatacctgatacttttgaagatgcagtgaatatactgaagccttcaactattattggagttgcaggtgctggccgtcttttcactcctgatgtaatcagagccatggcctctatcaatgaaaggcctgtaatatttgcattaagtaatcctacagcacaggcagagtgcacggctgaagaagcatatacacttacagagggcaggtgtttgtttgccagtggcagtccatttgggccagtgaaacttacagatgggcgagtctttacaccaggtcaaggaaacaatgtttatatttttccaggtgtggctttagctgttattctctgtaacacccggcatattagtgacagtgttttcctagaagctgcaaaggccctgacaagccaattgacagatgaagagctagcccaagggagactttacccaccgcttgctaatattcaggaagtttctattaacattgctattaaagttacagaatacctatatgctaataaaatggctttccgatacccagaacctgaagacaaggccaaatatgttaaagaaagaacatggcggagtgaatatgattccctgctgccagatgtgtatgaatggccagaatctgcatcaagccctcctgtgataacagaatagaagcactcccctgataaatactttctgtgctccagggaaccccttttttcagacaagaagagataatgtcttcagtttt

SEQ ID NO: 251 - DNA, 1029 bp, Homo sapiens
tctgcttttaataagcttcccaatcagctctcgagtgcaaagcgctctccctccctcgcccagccttcgtcctcctggcccgctcctctcatccctcccattctccatttcccttccgttccctccctgtcagggcgtaattgagtcaaaggcaggatcaggttccccgccttccagtccaaaaatcccgccaagagagccccagagcagaggaaaatccaaagtggagagaggggaagaaagagaccagtgagtcatccgtccagaaggcggggagagcagcagcggcccaagcaggagctgcagcgagccgggtacctggactcagcggtagcaacctcgccccttgcaacaaaggcagactgagcgccagagaggacgtttccaactcaaaaatgcaggctcaacagtaccagcagcagcgtcgaaaatttgcagctgccttcttggcattcattttcatactggcagctgtggatactgctgaagcagggaagaaagagaaaccagaaaaaaaagtgaagaagtctgactgtggagaatggcagtggagtgtgtgtgtgcccaccagtggagactgtgggctgggcacacgggagggcactcggactggagctgagtgcaagcaaaccatgaagacccagagatgtaagatcccctgcaactggaagaagcaatttggcgcggagtgcaaataccagttccaggcctggggagaatgtgacctgaacacagccctgaagaccagaactggaagtctgaagcgagccctgcacaatgccgaatgccagaagactgtcaccatctccaagccctgtggcaaactgaccaagcccaaacctcaagcagaatctaagaagaagaaaaaggaaggcaagaaacaggagaagatgctggattaaaagatgtcacctgtggaacataaaaaggacatcagcaaacaggatcagttaactattgcatttatatgtaccgtaggctttgtattcaaaaattatctatagctaagtacacaataagcaaaaacaa

SEQ ID NO: 252 - DNA, 2678 bp, Homo sapiens
cggccggccaatacataggaacacttgggtccctgcagtcagggtgtggaaatggcagatgagttcagccctaaggtgcatttttcttactaggaggagatggagtgtattttatgggatataagcattagctacatttcctgtcctgttcacatcctttgcccatgtgtctatgaggttattgatcttcttactgatttattgtagctctttacttaggaggttaattagccttttgcctgtggagagttttttggtttgccatttgtccttttttaattttttttgttttttggccatttgtcttttgactccgatgtggtttttgctgatttcctttgatgtattctagtttatctgacttttctttggcgacttatggactttctctcaccactaaaagccctcactgctctctcagtcttcttgatttaacctcctccaggcttccgccttctccaggccctgattctcagttggagttgctggtgcctcctccttcacccagcgtctgacgctggagtgctcacagtgtggctgggacccacttctctcctctgtagatacccacccctgtgttgatcacttgcaggcccgggttctgtgtgccatgtgtatgccctagagcccttgctcacgtttccccacagccttcatgaagtctgtgttcctcagatgccccacagacatcacaagcaaggcacatccaaaccccagaccactatccaggagcctgcaccctctttctgttggctccacctccagcctccgagacccacccacttccctgcatttgctgagaccatcattttccacctagacaatgcccccacgcttgccctacagcccttccaaaaacgattttttccaacttaaatcagactagaaagctttttcacatagcccagtcttcctccttgtgctgggttctgtctcattatcacctcatcagggaagtctgtacagatagaatccctacccctgcatttgtcgcctccgtctgcctctttggtcagtttcaggtccctgtagttcacactgtgtccccagggatgaagtgggtcccggcacggtgggcattctgtcatgaatgaatggtccccttgtgtatgcagggttcgcgctgcagctaggcagcatctccgcaggtccaggtagtgtaagccctcacctccacgtcccctgggacctcggcatggctggcctttctggccagatccaatcaccctcccgcgaaggtggctttgcgcatcgcgttctgctccccagcgatctgaggagtgaacaggaccccacggacgaggatccctgccggggtgtgggccctgctctgatcaccacccgctggcgctcccccaggggccggagccggggccgccccagcactgggggcggggtggttaggggcggccgttgcgatgtatgtggcaaggtgttcagccaacgcagcaacctgctgaggcaccagaagatccacacgggtgagcgaccattcgtgtgcagcgagtgcggccgcagcttcagccgcagctcgcacctgctgcgccaccagcttacgcacaccgaggagcggccgttcgtgtgcggcgactgtggccagggcttcgtgcgcagcgcgcgcctggaagagcatcggagagtgcacacgggcgaacagcctttccgttgcgctgagtgcggccagagcttccggcagcgctccaatctgctgcagcaccagcgcatccacggcgatcccccgggccctggcgctaagcccccggcccctcctggtgcgcccgagcctcccggcccctttccgtgcagcgagtgccgcgagagcttcgcgcggcgcgccgtgctgctggagcaccaggcggtacacacgggcgacaagtcctttggctgcgtcgagtgcggcgagcgcttcggccgccgctcagtgctgctgcagcaccggcgcgtgcacagtggcgagcggcccttcgcctgtgccgagtgcggccagagcttccggcagcgctccaacctgacgcagcaccggcgcatccacaccggggagcggcccttcgcctgcgccgagtgtggcaaggccttccgccagcggcctacgctcacgcagcatctccgcgtacacacgggcgagaaaccctttgcctgccccgagtgtggccagcgcttcagccagcgcctcaagctcacgcgtcatcagaggacacacaccggcgaaaagccctaccactgcggtgagtgcggcctgggcttcacgcaggtctcgcggctcaccgagcaccagcgcatccacacgggcgaacggcccttcgcctgccccgagtgcggccagagctttcggcagcacgccaacctcacccagcaccggcgcatccacacgggtgaacggccctacgcatgccctgagtgtggcaaggccttccgccagcggcccacgctcacgcagcatctgcgcacccaccgacgagagaagcccttcgcctgccaggactgtggccgccgcttccaccagagcaccaagctcattcagcaccagcgcgtccacagcgccgagtagctccagccgggacgcactgtgtccgccatggtcctcccctggttattgtgaggctggcgattacataagtataagcaggtcgcccagggcttggctactgtaggtgtccaataaacagtagatggaaacc

SEQ ID NO: 253 - DNA, 2373 bp, Homo sapiens
gaattcgggcgggggcgccgcccggggccctgagggctggctagggtccaggccgggggggacgggacagacgaaccagccccgtgtaggaagcgcgacaatgccccgctacggagcgtcactccgccagagctgccccaggtccggccgggagcagggacaagacgggaccgccggagcccccggactcctttggatgggcctggtgctggcgctggcgctggcgctggcgctggctctgtctgactctcgggttctctgggctccggcagaggctcaccctctttctccccaaggccatcctgccaggttacatcgcatagtgccccggctccgagatgtctttgggtgggggaacctcacctgcccaatctgcaaaggtctattcaccgccatcaacctcgggctgaagaaggaacccaatgtggctcgcgtgggctccgtggccatcaagctgtgcaatctgctgaagatagcaccacctgccgtgtgccaatccattgtccacctctttgaggatgacatggtggaggtgtggagacgctcagtgctgagcccatctgaggcctgtggcctgctcctgggctccacctgtgggcactgggacattttctcatcttggaacatctctttgcctactgtgccgaagccgccccccaaaccccctagccccccagccccaggtgcccctgtcagccgcatcctcttcctcactgacctgcactgggatcatgactacctggagggcacggaccctgactgtgcagacccactgtgctgccgccggggttctggcctgccgcccgcatcccggccaggtgccggatactggggcgaatacagcaagtgtgacctgcccctgaggaccctggagagcctgttgagtgggctgggcccagccggcccttttgatatggtgtactggacaggagacatccccgcacatgatgtctggcaccagactcgtcaggaccaactgcgggccctgaccaccgtcacagcacttgtgaggaagttcctggggccagtgccagtgtaccctgctgtgggtaaccatgaaagcatacctgtcaatagcttccctccccccttcattgagggcaaccactcctcccgctggctctatgaagcgatggccaaggcttgggagccctggctgcctgccgaagccctgcgcaccctcagaattggggggttctatgctctttccccataccccggtctccgcctcatctctctcaatatgaatttttgttcccgtgagaacttctggctcttgatcaactccacggatcccgcaggacagctccagtggctggtgggggagcttcaggctgctgaggatcgaggagacaaagtgcatataattggccacattcccccagggcactgtctgaagagctggagctggaattattaccgaattgtagccaggtatgagaacaccctggctgctcagttctttggccacactcatgtggatgaatttgaggtcttctatgatgaagagactctgagccggccgctggctgtagccttcctggcacccagtgcaactacctacatcggccttaatcctggttaccgtgtgtaccaaatagatggaaactactccaggagctctcacgtggtcctggaccatgagacctacatcctgaatctgacccaggcaaacataccgggagccataccgcactggcagcttctctacagggctcgagaaacctatgggctgcccaacacactgcctaccgcctggcacaacctggtatatcgcatgcggggcgacatgcaacttttccagaccttctggtttctctaccataagggccacccaccctcggagccctgtggcacgccctgccgtctggctactctttgtgcccagctctctgcccgtgctgacagccctgctctgtgccgccacctgatgccagatgggagcctcccagaggcccagagcctgtggccaaggccactgttttgctagggccccagggcccacatttgggaaagttcttgatgtaggaaagggtgaaaaagcccaaatgctgctgtggttcaaccaggcaagatcatccggtgaaagaaccagtccctgggccccaaggatgccggggaaacaggaccttctcctttcctggagctggtttagctggatatgggagggggtttggctgcctgtgcccaggagctagactgccttgaggctgctgtcctttcacagccatggagtagaggcctaagttgacactgccctgggcagacaagacaggagctgtcgccccaggcctgtgctgcccagccaggaaccctgtactgctgctgcgacctgatgctgccagtctgttaaaataaagcccgcccgaattc

SEQ ID NO: 254 - DNA, 2393 bp, Homo sapiens
cggcgcgggacccgggtggggaagctggagctgttgcggggtccgcggggaagtcttggcggtggagccatggtcggccagctgagcgagggggccattgcggccatcatgcagaagggggatacaaacataaagcccatcctccaagtcatcaacatccgtcccattactacggggaatagtccgccgcgttatcgactgctcatgagtgatggattgaacactctatcctctttcatgttggcgacacagttgaaccctctcgtggaggaagaacaattgtccagcaactgtgtatgccagattcacagatttattgtgaacactctgaaagacggaaggagagtagttatcttgatggaattagaagttttgaagtcagctgaagcagttggagtgaagattggcaatccagtgccctataatgaaggactcgggcagccgcaagtagctcctccagcgccagcagccagcccagcagcaagcagcaggccccagccgcagaatggaagctcgggaatgggttctactgtttctaaggcttatggtgcttcaaagacatttggaaaagctgcaggtcccagcctgtcacacacttctgggggaacacagtccaaagtggtgcccattgccagcctcactccttaccagtccaagtggaccatttgtgctcgtgttaccaacaaaagtcagatccgtacctggagcaactcccgaggggaagggaagcttttctccctagaactggttgacgaaagtggtgaaatccgagctacagctttcaatgagcaagtggacaagttctttcctcttattgaagtgaacaaggtgtattatttctcgaaaggcaccctgaagattgctaacaagcagttcacagctgttaaaaatgactacgagatgaccttcaataacgagacttccgtcatgccctgtgaggacgaccatcatttacctacggttcagtttgatttcacggggattgatgacctcgagaacaagtcgaaagactcacttgtagacatcatcgggatctgcaagagctatgaagacgccactaaaatcacagtgaggtctaacaacagagaagttgccaagaggaatatctacttgatggacacatccgggaaggtggtgactgctacactgtggggggaagatgctgataaatttgatggttctagacagcccgtgttggctatcaaaggagcccgagtctctgatttcggtggacggagcctctccgtgctgtcttcaagcactatcattgcgaatcctgacatcccagaggcctataagcttcgtggatggtttgacgcagaaggacaagccttagatggtgtttccatctctgatctaaagagcggcggagtcggagggagtaacaccaactggaaaaccttgtatgaggtcaaatccgagaacctgggccaaggcgacaagccggactactttagttctgtggccacagtggtgtatcttcgcaaagagaactgcatgtaccaagcctgcccgactcaggactgcaataagaaagtgattgatcaacagaatggattgtaccgctgtgagaagtgcgacaccgaatttcccaatttcaagtaccgcatgatcctgtcagtaaatattgcagattttcaagagaatcagtgggtgacttgtttccaggagtctgctgaagctatccttggacaaaatgctgcttatcttggggaattaaaagacaagaatgaacaggcatttgaagaagttttccagaatgccaacttccgatctttcatattcagagtcagggtcaaagtggagacctacaacgacgagtctcgaattaaggccactgtgatggacgtgaagcccgtggactacagagagtatggccgaaggctggtcatgagcatcaggagaagtgcattgatgtgagaggagcagtgccaatcgggcagaagtttgcaaataggcagaatggaatcgatttcctcccacctccgtgtgacgatcccatgttagctacacagtgcagaggctcttgatggtggactaagcaattcctccctcgtgcgcatctcagaacccatcggtaggcaaaggaaaatacgctcaggtggttgtggtgtagactgtgtcaggcctacggagtcagccagtggctagcgcaagaccagtcactccctctgccttcaggcttctgtcaatttcattatcatcaagcaggaattatgtcgtaagtcactgaccctaactgcagaccatgaagtaaattatgtaactaggtttttgcttctccagtggtgaccacccccccccatccccgctcacaacttgggttcttctcagcggggcgagctgagaagcggtcatgagcacctggggattttagtaagtgtgtcttccta

SEQ ID NO: 255 - DNA, 2542 bp, Homo sapiens
actccaggtggtagtgctcgctctggcgcagattagaggtccaccgggagagcggggccccccgggtcccccgggaccgccgggagtgcctggatccgacggcatcgacggtgacaatgggccccctggaaaagctggccctccgggacccaagggcgagcctggcaaagctgggccagatgggccagacgggaagcccgggattgatggtttaactggagccaagggggagcctggccccatggggatccctggagtcaagggccagcccgggcttcctggtcctcctggccttccgggccctggttttgctggacctcctgggcctcctggacctgttggcctccctggtgagattggaatccgaggccccaagggggaccctggaccagatggaccatcggggcccccaggaccccctgggaaacctggtcgcccgggaaccatccagggtctggaaggcagtgcggatttcctgtgtccaaccaactgtccacccggaatgaaaggtcccccagggctgcagggagtgaaggggcatgcgggcaaacgcgggattctgggtgatcctggccaccaggggaagccgggtcccaagggagatgtgggtgcctctggagagcaaggcatccctggaccaccgggtccccagggcatcaggggctacccaggcatggcagggcccaagggagagacgggccctcatggatataaaggcatggtgggcgctatcggtgccactgggccaccgggtgaggaaggtcctaggggaccgccaggccgagctggggagaagggtgacgagggcagcccaggtattcgtggaccccaggggatcacaggcccgaaaggagcaacgggccccccaggcatcaacggcaaggatgggaccccaggcacgcctggcatgaagggcagtgcaggacaggcgggacagcccggaagtccaggccaccagggcctagcgggtgtgccaggccagcctgggacaaaaggaggccctggagaccagggtgagccgggcccgcagggccttcctggattctctggtccccctgggaaagagggagagccagggcctcgaggagaaattggtccccagggcatcatgggacagaagggtgaccaaggcgagaggggtccagtggggcaaccaggccctcagggaaggcagggccctaagggggagcagggcccccccggaattccagggccccaaggcttgccaggcgtcaaaggagacaagggctccccagggaagaccgggccccgcggcaaagtgggtgacccaggggtggccggcctccccggagagaaaggcgagaagggcgagtccggcgagccggggcccaagggacagcaaggagtacgtggagaacccggctaccctgggcccagcggggatgcgggcgccccaggggttcagggctaccctggtccccccggccctcgaggactggccgggaaccgaggcgtgccaggacagcccgggagacagggcgtggagggccgggatgccactgaccagcacatcgtggatgtggcgctgaagatgctgcaagagcaactggcagaggtcgccgtgagtgccaagcgggaagccctgggtgcggtgggcatgatgggtcctccaggacctcctgggccccctgggtacccaggcaagcagggcccccatgggcaccctggccctcggggcgttcctggcatcgtgggagccgtgggtcagatcggcaacacggggcccaagggaaaacgtggagagaagggtgatccaggagaagtgggacgggggcaccccgggatgcctgggcccccagggatcccaggacttcctggccggcctggccaggcaatcaacggcaaggatggagatcgagggtccccaggggctccaggagaggcaggtcgacctggcctgccaggccccgtggggctgccgggcttctgtgaacctgccgcctgccttggagcttcggcctatgcctctgcccgccttacagagcctggatccatcaaggggccttgagcatcaggcccagacagagcctggcaggcatcctggcgggaaggaccaggtcccctctggtggacatgcacccatccccagtccaggaaaccatctcccccaggaccttctgtctgggactcaggagtcctaaggaaaaggaattctaaaacatgggggaaggggaggtagagcactgatgggtgaaaaagtgaggccaacacacagggcaagtggtgtcgatggagtcgaagcgctgaaggaatagggcggctttccttccagcgagcatcattcggctgttaccaaaacaaacatcttaatctgcaccttcctccactggccatcttgtccttgggtcagtgggacatgggcacctcgggaggcccgggccctgcccagctacagttccacccctcagcttgaggaccaatactgaggtctatgccagttcctgatcccatctcactctctggacctactaggtgactgctgctggggtgactcccctgaggcggctatacccttaagcca

SEQ ID NO: 256 - DNA, 798 bp, Homo sapiens
aaaattctgagctgtacacctctaggaaatgaaacactagttcagaagaagcctgtaaactctcttacaaatacatttggttattcaccatgaggttagcaaagcctaaagcgggtatttctcggagctcaagccaaggaaaggcctatgagaacaagcgcaaaacaggccggcagcgcgagaagtggggcatgactattcgatttgactcaagcttcagtagactcagaagaagcttggatgacaaaccctataaatgtactgaatgtgaaaagagtttcagtcagagttcaactctttttcaacaccagaagatccatactggaaagaaatcccataaatgtgctgattgtgggaaaagtttctttcagagttctaatctcattcagcatcgacggatccatacgggggaaaagccctacaaatgtgatgagtgtggagaaagcttcaaacagagctcaaatctcattcagcaccagagaattcatactggagaaaaaccctatcagtgtgatgagtgtggccggtgtttcagccagagctcccaccttattcaacatcagagaacccacactggggagaaaccctaccagtgcagtgaatgtggcaaatgtttcagtcagagctctcatctgaggcagcacatgaaggtgcataaagaagagaagcctcgtaaaacccggggcaaaaatatcagggtgaagactcacttaccctcttggaaagctggtacagaaggaagtctgtggctggtctccgttaagtatagggctttttgacagctttttgagacctctt

SEQ ID NO: 257 - DNA, 2685 bp, Homo sapiens
cgaggagagagagagagtaaggagccagccatgaatcctttccagaaaaatgagtccaaggaaactcttttttcacctgtctccattgaagaggtaccacctcgaccacctagccctccaaagaagccatctccgacaatctgtggctccaactatccactgagcattgccttcattgtggtgaatgaattctgcgagcgcttttcctattatggaatgaaagctgtgctgatcctgtatttcctgtatttcctgcactggaatgaagatacctccacatctatataccatgccttcagcagcctctgttattttactcccatcctgggagcagccattgctgactcgtggttgggaaaattcaagacaatcatctatctctccttggtgtatgtgcttggccatgtgatcaagtccttgggtgccttaccaatactgggaggacaagtggtacacacagtcctatcattgatcggcctgagtctaatagctttggggacaggaggcatcaaaccctgtgtggcagcttttggtggagaccagtttgaagaaaaacatgcagaggaacggactagatacttctcagtcttctacctgtccatcaatgcagggagcttgatttctacatttatcacacccatgctgagaggagatgtgcaatgttttggagaagactgctatgcattggcttttggagttccaggactgctcatggtaattgcacttgttgtgtttgcaatgggaagcaaaatatacaataaaccaccccctgaaggaaacatagtggctcaagttttcaaatgtatctggtttgctatttccaatcgtttcaagaaccgttctggagacattccaaagcgacacgactggctagactgggcggctgagaaatatccaaagcagctcattatggatgtaaaggcactgaccagggtactattcctttatatcccattgcccatgttctgggctcttttggatcagcagggttcacgatggactttgcaagccatcaggatgaataggaatttggggttttttgtgcttcagccggaccagatgcaggttctaaatccccttctggttcttatcttcatcccgttgtttgactttgtcatttatcgtctggtctccaagtgtggaattaacttctcatcacttaggaaaatggctgttggtatgatcctagcatgcctggcatttgcagttgcggcacgtgtagagataaaaataaatgaaatggccccagcccagccaggtccccaggaggttttcctacaagtcttgaatctggcagatgatgaggtgaaggtgacagtggtgggaaatgaaaacaattctctgttgatagagtccatcaaatcctttcagaaaacaccacactattccaaactgcacctgaaaacaaaaagccaggattttcacttccacctgaaatatcacaatttgtctctctacactgagcattctgtgcaggagaagaactggtacagtcttgtcattcgtgaagatgggaacagtatctccagcatgatggtaaaggatacagaaagcagaacaaccaatgggatgacaaccgtgaggtttgttaacactttgcataaagatgtcaacatctccctgagtacagatacctctctcaatgttggtgaagactatggtgtgtctgcttatagaactgtgcaaagaggagaataccctgcagtgcactgtagaacagaagataagaacttttctctgaatttgggtcttctagactttggtgcagcatatctgtttgttattactaataacaccaatcagggtcttcaggcctggaagattgaagacattccagccaacaaaatgtccattcggtggcagctaccacaatatgccctggttacagctggggaggtcatgttctctgtcacaggtcttgagttttcttattctcaggctccctctagcatgaaatctgtgctccaggcagcttggctattgacaattgcagttgggaatatcatcgtgcttgttgtggcacagttcagtggcctggtacagtgggccgaattcattttgttttcctgcctcctgctggtgatctgcctgatcttctccatcatgggctactactatgttcctgtaaagacagaggatatgcggggtccagcagataagcacattcctcacatccaggggaacatgatcaaactagagaccaagaagacaaaactctgatgactccctagattctgtcctaaccccaattccctggccctgtcttgaagcattttttttcttctactggattagacaagagagatagcagcatatcagagctgatctcctccacctttctccaatgacagaagttccaggactggttttccagtacatctttaaacaaggccccagagactctatgtctgcccgtccatcagtgaactcattaaaacttgtgcagtgttgctggagctggcctggtgtctccaaatgaccatgaaaatacacacgtataatggagatcattctctgtgggtatgcaaagttatgggaattcctttataggtaactgccatttaggactgatggccctaatttttgaggtgctgatttagaggcaaaattgcagaataacaaagaaatggtatttcaagtttttttttttataagcaatgtaattatgctattcacaggggcccg

SEQ ID NO: 258 - DNA, 1972 bp, Homo sapiens
gggtgtgatggggcagaggaacttacgttatgatagtacaagacagaggttgagcctcattttaataggcattgtggtgggtgttgaatagtgatggaatgtatgggtctggaatcaggctgcctggtcaagggctctgaaacatgagtgtgcatcagaatcacctcgaggcttgttaaaggataggctgtggaccacatctcctcagttgctgattcagtgggtgtgggtggggcctgagaattcacatttctcactggtgatgctgctgttactgagtttgggaccacatttggagaaccactggtctagaattgagaggttggcaaaccttctctgttaagaggtagatagtaaatattttaggccttctgggctacaaagagtatctgttacatattttttattgcttttcatgacccattaagcatatatatatcattctctgccatatacaaacaggctgttgggggagtgaggatgatgtagggaaggtggggcatggtttaataacccctgggccatgcctagatgatcagtcctctgccacatagctggctgacctttgccaagttaatcaccttttacctttattttctcatgtttctaataaaacagagacgataatattcatacttcttaccatatagaacttctgaggattcagtgagcaaagccacaaaagatggtatgtcacaatatctgggatatagctagaatttataatttatttttactctgttgataggcaatgggaaaacagtaagaggcagaccaacagtgatccagggctctgaaagctaattgcttcaagatcctgctaccattttcttttgggccgcttgcaaagaagaatcctttgactgaagcatgtatgtacactctgaagtacagcctgggttagtctcttataagggatcggatcattgctcagcctctcccttgagtggcacttagaaaatggcgctattcgtaagctgactggtattgggcccaggactctggctgaaggggtgggcatgctggtaaccatttgcaacctatgctcaggtcctacttgttgggaagccctgattgagaagagtggcctggtctgtgctggcattagataggatctggctgcattaatattgaaactactctgccttttatgtctcattttgcctcatggtgggagtgaaagtgagaaccacagaaaatctgcctgccaggtgttccacatttcttgtgctacagcatgcaagtgagcagtgaggtgttaccttttcctcatgtagctgggaaagcaatacccctgcttgtacctctggcatatcttctctgtgctggtgcacctagagaggttgcctggtggccctgagagaccatctcatcactaaacactgatggtgaaagctggccatgctcaaataagatgtagcaatctacctcttctttgtctagttacccccaagggggcatccactttcttgctcacctcaccagttgcattgttctagtccttgccagaagcacataataatgactttgtaagcttaagttacaggcacacaaaagggcctgatggtgatatgactccaccctccccgtttttgctgacattccgccaaatatccttctgtctcctccccaccttgcaaaacaaacttgctgttttgaatttggtccaggctggaacagccccactacacctgttaacacacgcagacgcacacttcccccttcataattgcttagcttcttgttgcctagccagatttcccctcagcttacagttcctgaatcataagatattgaaccagcaaatttaagagttgacattttacttagaggtattcaagtgaaaacatggcttctggtttattttgctgtattgtgccatgaccacttggctaattcttctcctccttcacagcagcagaatggaagtgaggaaaggcaaccagctgacacaggagccagagtgagacca

SEQ ID NO: 259 - DNA, 1857 bp, Homo sapiens
gccccggccccgccccagccctcctgatccctcgcagcccggctccggccgcccgcctctgccgccgcaatgatgatgatggcgctgagcaagaccttcgggcagaagcccgtgaagttccagctggaggacgacggcgagttctacatgatcggctccgaggtgggaaactacctccgtatgttccgaggttctctgtacaagagatacccctcactctggaggcgactagccactgtggaagagaggaagaaaatagttgcatcgtcacatggtaaaaaaacaaaacctaacactaaggatcacggatacacgactctagccaccagtgtgaccctgttaaaagcctcggaagtggaagagattctggatggcaacgatgagaagtacaaggctgtgtccatcagcacagagccccccacctacctcagggaacagaaggccaagaggaacagccagtgggtacccaccctgtccaacagctcccaccacttagatgccgtgccatgctccacaaccatcaacaggaaccgcatgggccgagacaagaagagaaccttccccctttgctttgatgaccatgacccagctgtgatccatgagaacgcatctcagcccgaggtgctggtccccatccggctggacatggagatcgatgggcagaagctgcgagacgccttcacctggaacatgaatgagaagttgatgacgcctgagatgttttcagaaatcctctgtgacgatctggatttgaacccgctgacgtttgtgccagccatcgcctctgccatcagacagcagatcgagtcctaccccacggacagcatcctggaggaccagtcagaccagcgcgtcatcatcaagctgaacatccatgtgggaaacatttccctggtggaccagtttgagtgggacatgtcagagaaggagaactcaccagagaagtttgccctgaagctgtgctcggagctggggttgggcggggagtttgtcaccaccatcgcatacagcatccggggacagctgagctggcatcagaagacctacgccttcagcgagaaccctctgcccacagtggagattgccatccggaacacgggcgatgcggaccagtggtgcccactgctggagactctgacagacgctgagatggagaagaagatccgcgaccaggacaggaacacgaggcggatgaggcgtcttgccaacacgggcccggcctggtaaccagcccatcagcacacggctcccacggagcatctcagaagattgggccgcctctcctccatcttctggcaaggacagaggcgaggggacagcccagcgccatcctgaggatcgggtgggggtggagtgggggcttccaggtggcccttcccggtacacattccatttgttgagccccagtcctgccccccaccccaccctccctacccctccccagtctctggggtcaggaagaaaccttattttaggttgtgttttgtttttgtataggagccccaggcagggctagtaacagtttttaaataaaaggcaacaggtcatgttcaatttcttaaatctagtgtctttatttcttctgttacaatagtgttgcttgtgtaagcaggttagagtgcacagtgtccccaattgttcctggcactgcaaaaccaaattaaacaatcccacaaagaattctgacatcaatgtgttttcctcagtcaggtctatttcaagattctagaagttccttttgtaaaacttgcctttaaaactcttcctcctaatgccatcagatctcttaacattggctcactgtgggatctttcctcttaggttgaatttctacgtgaatatcaaagtgcctttttc

SEQ ID NO: 260 - DNA, 2553 bp, Homo sapiens
ctaaaggccttgcacaacatcagagagttcatactggagagaaccttacacatttcacgagtatggaaagacctttgctcaaaattcagcccttgtaatgcataaggcaattcatactggaaagaaaccttacacatgtaatgaatgtggcaaggtttttagtagaaaagcacaccttgcatgtcatcatagacttcatactgtctaaggtttctaatcaacaatcaaaccttgcacaacatcagagagtttatactggagagaaaccttacaagtgtaatgagtggggcaaagccttaagtgggaagtcgtcacttttttatcatcaagcaatccatggtgtagggaaactttgcaaatgtaatgattgtcacaaagtcttcagtaatgctacaaccattgcaaatcactggagaatccataatgaagacagatcttacaagtgtaataaatgtggtaaaattttcagacatcgatcatatcttgcagtttatcagcgaactcatactggagagaaaccttacaaatatcatgactgtggcaaggtcttcagtcaagcttcatcctatgcaaaacataggagaattcatacaggagagaaacctcacaagtgtgatgattgtggcaaagtcttgacttcacgttcacacctcattagacatcagagaatccatactggacagaaatcttacaaatgtcttaagtgtggcaaggtcttcagtctgtgggcactccatgcagaacatcagaaaattcatttttgagataactgttccaaatacagtgactatagaagatcataaagctttaattgacattagagccaaataggcattgacttgagattgagttgacttaaccttgagtttaagaattaatttacattaaagtgtttatgttaagaagattgggccaggtgggattacaggcgcgagcaccgcgcccggcccctaagttaatatttcaaacaatcgaaggtaaaacaacatattgtgttgggccacctgtactgaacgctgaatcgtttttcctcttaagttgaaaatggttttaatgcaaagcgcctttttttgagcaggtagagtcacgcatccggcaggcggggcgagctcccctctgtctggggcagggtgggggagaggggcagggacctcggtaaaggggtggagtggcgcgctggttgccgcgggcactggcaattagaagggattattaaactaagcaaggtcctgggttgtttgagtggataatggaaactgaaaggtgacgtgcaaaactgcctattactcccaggagtggaggataatttcatatttcatggaaataaactcagggcccggagcggtggctcacacctgtaatcccagcactttgagaggccaaggagggaggatcgcttaagcccaggaattcgaaatcagcctaggcaacatagtaagacctcatctctactaaaaataaaaaaaaacagccaggtgtgttagtccacacctgtggtcccagctgcctcagcttcccgagtagctgggattacaggtatgaaccactatgcccggctaactttgttttttttttttagaaattaaaccttttttcagcttaatgacccaggggtgtatttttgaaggacttgggagctctctttgaaaggcaaacaacaagggaaacagtacctttatctcagtaggaaattaaataattcaaacatcaaataacttcaatttaaggctatggactttgagataattctgagccttgagaggaatgtggtcaggcaacctgagtccagtggaatgcaggtgcaacttctaagagttttcctgtaagtaattaagaagactaagtagccccagagataagacctcctcggatcattgtcccttcttatgtagtgataaagtaaccttccttgaagtgtatctatccgtaatcaatcaagttgctgcagcctatgcactggcccagaataaaaaacgtggtgattctgctaaagcttctctgtctttccctgtgtgtgaaatcttaacgtctctacttgggaacgctgatcccattcatttagagttgatgtttccacgtggctatttccaagctttgccttcaaataaattctgtacttaatcatatattctaaattttattatttactgctgacatcagtttctgtcggattgtaggagcctcaccagagagggcccctgtcgccatgttgtaaaactcacacttgccaaaagttgtgggttagggtttctccccctccctcaggatgacgctagttagctgacacagatggtcacctccattaccaagtagagtcaggatgaactatgtgtgactgttcaactatgtgtcctcttccctgaggactgattagtgtttatcttgaaaacatgtccttaatgggttgtatagaacactgaagcatctgatttcaaactcttagctcttttcctctatttcccatcacattctggtctaaggcttatttattaataaaatgatttttatttctttaaacaaaaaaaactttagagcacactggggtaccggatc

SEQ ID NO: 261 - DNA, 2258 bp, Homo sapiens
gatatcacagcaacattgaaatgctaaaaagtttttaaacactctcaatttctaattcaccatgtcacagactggtgaaaaaaaaaaaaaaagcggccgcttccccccggccgggcccccgccgccccgcggtccccagagcgccaggcccccggggggagggagggagggcgccgggccggtgggagccagcggcgcgcggtgggacccacggagccccgcgacccgccgagcctggagccgggccggctcggggaagccggctccagcccggagcgaacttcgcagcccgtcggggggcggcggggagggggcccggagccggaggagggggcggccgcgggcacccccgcctgtgccccggcgtccccgggcaccatgctgtccaactcccagggccagagcccgccggtgccgttccccgccccggccccgccgccgcagccccccacccctgccctgccgcaccccccggcgcagccgccgccgccgcccccgcagcagttcccgcagttccacgtcaagtccggcctgcagatcaagaagaacgccatcatcgatgactacaaggtcaccagccaggtcctggggctgggcatcaacggcaaagttttgcagatcttcaacaagaggacccaggagaaattcgccctcaaaatgcttcaggactgccccaaggcccgcagggaggtggagctgcactggcgggcctcccagtgcccgcacatcgtacggatcgtggatgtgtacgagaatctgtacgcagggaggaagtgcctgctgattgtcatggaatgtttggacggtggagaactctttagccgaatccaggatcgaggagaccaggcattcacagaaagagaagcatccgaaatcatgaagagcatcggtgaggccatccagtatctgcattcaatcaacattgcccatcgggatgtcaagcctgagaatctcttatacacctccaaaaggcccaacgccatcctgaaactcactgactttggctttgccaaggaaaccaccagccacaactctttgaccactccttgttatacaccgtactatgtggctccagaagtgctgggtccagagaagtatgacaagtcctgtgacatgtggtccctgggtgtcatcatgtacatcctgctgtgtgggtatccccccttctactccaaccacggccttgccatctctccgggcatgaagactcgcatccgaatgggccagtatgaatttcccaacccagaatggtcagaagtatcagaggaagtgaagatgctcattcggaatctgctgaaaacagagcccacccagagaatgaccatcaccgagtttatgaaccacccttggatcatgcaatcaacaaaggtccctcaaaccccactgcacaccagccgggtcctgaaggaggacaaggagcggtgggaggatgtcaaggggtgtcttcatgacaagaacagcgaccaggccacttggctgaccaggttgtgagcagaggattctgtgttcctgtccaaactcagtgctgtttcttagaatccttttattccctgggtctctaatgggaccttaaagaccatctggtatcatcttctcattttgcagaagagaaactgaggcccagaggcggagggcagtctgctcaaggtcacgcagctggtgactggttggggcagaccggacccaggtttcctgactcctggcccaagtctcttcctcctatcctgcgggatcactggggggctctcagggaacagcagcagtgccatagccaggctctctgctgcccagcgctggggtgaggctgccgttgtcagcgtggaccactaaccagcccgtcttctctctctgctcccacccctgccgcctcacctgcccttgttgtctctgtctctcactgtctcttctgctgtctctctactgtcttctggctctctctgtacccttcctggtgctgccgtgcccccaggaggagatgaccagtgccttggccacaatgcgcgttgactacgagcagatcaagataaaaaagattgaagatgcatccaaccctctgctgctgaagaggcggaagaaagctcgggccctggaggctgcggctctggcccactgagccaccgcgccctcctgcccacgggaggacaagcaataactctctacaggaatatattttttaaacgaagagacagaactgtccacatctgcctcctctcctcctcagctgcatggagcctggaactgcatcagtgactgaattc

SEQ ID NO: 262 - DNA, 1100 bp, Homo sapiens
agtccccaacatggcggctccccaagacgtccacgtccggatctgtaaccaagagattgtcaaatttgacctggaggtgaaggcgcttattcaggatatccgtgattgttcaggacccttaagtgctcttactgaactgaatactaaagtaaaagagaaatttcaacagttgcgtcacagaatacaggacctggagcagttggctaaagagcaagacaaagaatcagagaaacaacttctactccaggaagtggagaatcacaaaaagcagatgctcagcaatcaggcctcatggaggaaagctaatctcacctgcaaaattgcaatcgacaatctagagaaagcagaacttcttcagggaggagatctcttaaggcaaaggaaaaccaccaaagagagcctggcccagacatccagtaccatcactgagagcctcatggggatcagcaggatgatggcccagcaggtccagcagagcgaggaggccatgcagtctctagtcacttcttcacgaacgatcctggatgcaaatgaagaatttaagtccatgtcgggcaccatccagctgggccggaagcttatcacaaaatacaatcgccgggagctgacggacaagcttctcatcttccttgcgctacgcctgtttcttgctacggtcctctatattgtgaaaaagcggctctttccatttttgtgagatcccaaaggtgccagttctggccctttcagctcctgtttcaggatctgtcctggttcctgagctctaggctgctaagctgagccacacacccctccgttttgcaccagttgcctgcaggttggatggaacacagtgccccacttttctgcaagtagctggcttgtaaagggtgaacagagccatgggaggaaggtctggcattgggatgccgccctggggacatacgaaccgcctccttccaccattgtgcactatgggaggccgctgctgcgtggagcacttaaagtccagcctccaggaccggatgcccctcctgtctcccgctcccatcgtgcccttaaatgccagatctggtggagggaagagagaagaggtaggaagaaaggtgatgaaaactcct

SEQ ID NO: 263 - DNA, 4198 bp, Homo sapiens
ctgctatcaaaaaggccataaggattttgtccccaaatttcacatgagctaccttgcttcaaactactgagatgaagggggcaagattatttgtccttctttctagtttatggagtgggggcattgggcttaacaacagtaagcattcttggactatacctgaggatgggaactctcagaagactatgccttctgcttcagttcctccaaataaaatacaaagtttgcaaatactgccaaccactcgggtcatgtcggcggagatagctacaactccagaggcaagaacttctgaagacagtcttcttaaatcaacactgcctccctcagaaacaagtgcacctgctgagggtgtgagaaatcaaactctcacatccacagagaaagcagaaggagtggtcaagttacagaatcttaccctcccaaccaacgctagcatcaagttcaatcctggagcagaatcagtggtcctttccaattctacactgaaatttcttcagagctttgccagaaagtcaaatgaacaagcaacttctctaaacacagttggaggcactggaggcattggaggcgttggaggcactggaggcgtgggaaatcgagccccacgggaaacatacctcagccggggtgacagcagttccagccaaagaactgactaccaaaaatcaaatttcgaaacaactagaggaaagaattggtgtgcttatgtacataccaggttatctcccacagtgacattggacaaccaggtcacttatgtcccaggtgggaaaggaccttgtggctggaccggtggatcctgtcctcagagatctcagaagatatccaatcctgtctataggatgcaacataaaattgtcacctcattggattggaggtgctgtcctggatacagtgggccgaaatgtcaactaagagcccaggaacagcaaagtttgatacacaccaaccaggctgaaagtcatacagctgttggcagaggagtagctgagcagcagcagcagcaaggctgtggtgacccagaagtgatgcaaaaaatgactgatcaggtgaactaccaggcaatgaaactgactcttctgcagaagaagattgacaatatttctttgactgtgaatgatgtaaggaacacttactcctccctagaaggaaaagtcagcgaagataaaagcagagaatttcaatctcttctaaaaggtctaaaatccaaaagcattaatgtactgataagagacatagtaagagaacaatttaaaatttttcaaaatgacatgcaagagactgtagcacagctcttcaagactgtatcaagtctatcagaggacctcgaaagcaccaggcaaataattcaaaaagttaatgaatctgtggtttcaatagcagcccagcaaaagtttgttttggtgcaagagaatcggcccactttgactgatatagtggaactaaggaatcacattgtgaatgtaaggcaagaaatgactcttacatgtgagaagcctattaaagaactagaagtaaagcagactcatttagaaggtgctctagaacaggaacactcaagaagcattctgtattatgaatccctcaataaaactctttctaaattgaaggaagtacatgagcagcttttatcaactgaacaggtatcagaccagaagaatgctccagctgctgagtcagttagcaataatgtcactgagtacatgtctactttacatgaaaatataaagaagcagagtttgatgatgctgcaaatgtttgaagatttgcacattcaagaaagcaagattaacaatctcaccgtctctttggagatggagaaagagtctctcagaggtgaatgtgaagacatgttatccaaatgcagaaatgattttaaatttcaacttaaggacacagaagagaatttacatgtgttaaatcaaacattggctgaagttctctttccaatggacaataagatggacaaaatgagtgagcaactaaatgatttgacttatgatatggagatccttcaacccttgcttgagcagggagcatcactcagacagacaatgacatatgaacaaccaaaggaagcaatagtgataaggaaaaagatagaaaatctgactagtgctgtcaatagtctaaattttattatcaaagaacttacaaaaagacacaacttacttagaaatgaagtacagggtcgtgatgatgccttagaaagacgtatcaatgaatatgccttagaaatggaagatggcctcaataagacaatgactattataaataatgctattgatttcattcaagataactatgccctaaaagagactttaagtactattaaggataatagtgagatccatcataaatgtacctccgatatggaaactattttgacatttattcctcagttccaccgtctgaatgattctattcagactttggtcaatgacaatcagagatataactttgttttgcaagtcgccaagacccttgcaggtattcccagagatgagaaactaaatcagtccaacttccaaaagatgtatcaaatgttcaatgaaaccacttcccaagtgagaaaataccagcaaaatatgagtcatttggaagaaaaactactcttaactaccaagatttccaaaaattttgagactcggttgcaagacattgagtctaaagttacccagacgctcataccttattatatttcagttaaaaaaggcagtgtagttacaaatgagagagatcaggctcttcaactgcaagtattaaattccagatttaaggcgttggaagcaaaatctatccatctttcaattaacttcttttcgcttaacaaaactctccacgaagttttaacaatgtgtcacaatgcttctacaagtgtgtcagaactgaatgctaccatccctaagtggataaaacattccctgccagatattcaacttcttcagaaaggtctaacagaatttgtggaaccaataattcaaataaaaactcaagctgccctatctaattcaacttgttgtatagatcgatcgttgcctggtagtctggcaaatgttgtcaagtctcagaagcaagtaaaatcattgccaaagaaaattaacgcacttaagaaaccaacggtaaatcttaccacagtcctgataggccggactcaaagaaacacggacaacataatatatcctgaggagtattcaagctgtagtcggcatccgtgccaaaatgggggcacgtgcataaatggaagaactagctttacctgtgcctgcagacatccttttactggtgacaactgcactatcaagcttgtggaagaaaatgctttagctccagatttttccaaaggatcttacagatatgcacccatggtggcattttttgcatctcatacgtatggaatgactatacctggtcctatcctgtttaataacttggatgtcaattatggagcttcatataccccaagaactggaaaatttagaattccgtatcttggagtatatgttttcaagtacaccatcgagtcatttagtgctcatatttctggatttttagtggttgatggaatagacaagcttgcatttgagtctgaaaatattaacagtgaaatacactgtgatagggttttaactggggatgccttattagaattaaattatgggcaggaagtctggttacgacttgcaaaaggaacaattccagccaagtttccccctgttactacatttagtggctatttattatatcgtacataagttagtatgaaaaacagactatcacctttattgagaaacagccagtgttttcatttatctttgcttgcacatctgctctgttttggtttttctacaggaaatgaaaatcaacttgtttttttaatatgagtaaacttgtatgtctattttataaaattatttgaatattgtttaatgtctgaatatgaaagagttcttgatcctaaagaaatttagtggcacagaaaacaaagtgaatttgttagcataattattcctattcttatttcttcattttaagtcattgcaatggaaagtaatattataaaacggtaattacaacatattatcagtcacagttttctttccaattaaacacttaacttttgttattccctgtatataaatatataacacacattttctagattcacaaatttaaataaattactcaaaaaatg

SEQ ID NO: 264 - DNA, 2002 bp, Homo sapiens
tataacgtgagggctgaatgcagcccattctctggagaacttcctcacacaccgcagcaaagagaagactgaaagacaaacctgggtgcagccagagaggtccagatagatgagcttgtggcatccattccccaagttcagcctagggactccacgtaccccagctgggtctcattgttccagaactgcattagttaagattacccagacttggatttcaaaggaatactttcattgttccgtctgtaacacgaagtaattggggccagctggatgtcaggatgcgtgtggttaccattgtaatcttgctctgcttttgcaaagcggctgagctgcgcaaagcaagcccaggcagtgtgagaagccgagtgaatcatggccgggcgggtggaggccggagaggctccaacccggtcaaacgctacgcaccaggcctcccgtgtgacgtgtacacatatctccatgagaaatacttagattgtcaagaaagaaaattagtttatgtgctgcctggttggcctcaggatttgctgcacatgctgctagcaagaaacaagatccgcacattgaagaacaacatgttttccaagtttaaaaagctgaaaagcctggatctgcagcagaatgagatctctaaaattgagagtgaggcgttctttggtttaaacaaactcaccaccctcttactgcagcacaaccagatcaaagtcttgacggaggaagtgttcatttacacacctctcttgagctacctgcgtctttatgacaacccctggcactgtacttgtgagatagaaacgcttatttcaatgttgcagattcccaggaaccggaatttggcgaactacgccaagtgtgaaagtccacaagaacaaaaaaataaaaaactgcggcagataaaatctgaacagttgtgtaatgaagaagaaaaggaacaattggacccgaaaccccaagtgtcagggagacccccagtcatcaagcctgaggtggactcaactttttgccacaattatgtgtttcccatacaaacactggactgcaaaaggaaagagttgaaaaaagtgccaaacaacatccctccagatattgttaaacttgacttgtcatacaataaaatcaaccaacttcgacccaaggaatttgaagatgttcatgagctgaagaaattaaacctcagcagcaatggcattgaattcatcgatcctgggtctttgagatgaaaccctgcaagtagacttacgtgaatgatttttgctgtgccgcttttttagggctcacacatttagaagaattagatttatcaaacaacagtctgcaaaactttgactatggcgtattagaagacttgtattttttgaaactcttgtggctcagagataacccttggagatgtgactacaacattcactacctctactactggttaaagcaccactacaatgtccattttaatggcctggaatgcaaaacgcctgaagaatacaaaggatggtctgtgggaaaatatattagaagttactatgaagaatgccccaaagacaagttaccagcatatcctgagtcatttgaccaagacacagaagatgatgaatgggaaaaaaaacatagagatcacaccgcaaagaagcaaagcgtaataattactatagtaggataaggtagaaattgttctgattgtaattagttttgtattttctatactggtgttagaaaacatatgtttacatttgattaactgtgttgcctatttatgcagggtaatccagctaaaggaagctttctttaattataagtattattgtgactattatagtaatcaagagaatgctatcatcctgcttgcctgtccatttgtggaacagcatctggtgatatgcaattccacactggtaacctgcagcagttgggtcctaatgatggcattagactttcataatgtcctgtataaatgtttttactgcttttagaaaataaagaaaaaaaacttggttcatgttta

SEQ ID NO: 265 - DNA, 1358 bp, Homo sapiens
cctgccctggaagcggatcgaagtgatggccctgcccaaaccgggcggggcccacagcctagccctggtgacagtgcccagcatgggctatgctcctgttcctccccccacctcactgcagcccctgctgccccagcagcctgtgttcgtagtgcaagagactgatggctccgtgactctggacaatggcatcatccgagtgaagctggacccaactggtcgcctgacgtccttggtcctggtggcctctggcagggaggccattgctgagggcgccgtggggaaccagtttgtgctatttgatgatgtccccttgtactgggatgcatgggacgtcatggactaccacctggagacacggaagcctgtgctgggccaggcagggaccctggcagtgggcaccgagggcggcctgcggggcagcgcctggttcttgctacagatcagccccaacagtcggcttagccaggaggttgtgctggacgttggctgcccctatgtccgcttccacaccgaggtacactggcatgaggcccacaagttcctgaaggtggagttccctgctcgcgtgcggagttcccaggccacctatgagatccagtttgggcacctgcagcgacctacccactacaatacctcttgggactgggctcgatttgaggtgtgggcccatcgctggatggatctgtcagaacacggctttgggctggccctgctcaacgactgcaagtatggcgcgtcagtgcgaggcagcatcctcagcctctcgctcttgcgggcgcctaaagccccggacgctactgctgacacggggcgccacgagttcacctatgcactgatgccgcacaagggctctttccaggatgctggcgttatccaagctgcctacagcctaaacttccccctgttggctctgccagcccccagcccagcgcccgccacctcctggagtgcgttttccgtgtcttcacccgcggtcgtattggagaccgtcaagcaggcggagagcagcccccagcgccgctcgctggtcctgaggctgtatgaggcccacggcagccacgtggactgctggctgcacttgtcgctgccggttcaggaggccatcctctgcgatctcttggagcgaccagaccctgctggccacttgacttcgggacaaccgcctgaagctcaccttttctcccttccaagtgctgtccctgttgctcgtgcttcagcctccgccacactgagtccctggggctggggttttgtttgtagaaggctctggggactcctaatttctgcttccccagcctaaagcagggatcagtcttttcttgtggaataaatccttggatcgggaaaaaaaaaaa

SEQ ID NO: 266 - DNA, 6568 bp, Homo sapiens
  misc_feature (1)...(6568): n=a,t,g or c
gaaggcgagcacccagacgggggcccgccggggtcgcggccagcgccggggaaatgccgcgccggggagcagcatgcgccggcctgagcccttccctttgcactcggctgttttttacgtttaaccagaaaggaagggagaggagggaaagatccatgtggctgccctcttccgatcacaaatattgtcgggaaggctactggccggaaagcgccgctgtggctgagagcgaagtttcagagactcttatttaaactgggttgttacattcaaaaaaactgcggcaagttcttggttgtgggcctcctcatatttggggccttcgcggtgggattaaaagcagcgaacctcgagaccaacgtggaggagctgtgggtggaagttggaggacgagtaagtcgtgaattaaattatactcgccagaagattggagaagaggctatgtttaatcctcaactcatgatacagacccctaaagaagaaggtgctaatgtcctgaccacagaagcgctcctacaacacctggactcggcactccaggccagccgtgtccatgtatacatgtacaacaggcagtggaaattggaacatttgtgttacaaatcaggagagcttatcacagaaacaggttacatggatcagataatagaatatctttacccttgtttgattattacacctttggactgcttctgggaaggggcgaaattacagtctgggacagcatacctcctaggtaaacctcctttgcggtggacaaacttcgaccctttggaattcctggaagagttaaagaaaataaactatcaagtggacagctgggaggaaatgctgaataaggctgaggttggtcatggttacatggaccgcccctgcctcaatccggccgatccagactgccccgccacagcccccaacaaaaattcaaccaaacctcttgatatggcccttgttttgaatggtggatgtcatggcttatccagaaagtatatgcactggcaggaggagttgattgtgggtggcacagtcaagaacagcactggaaaactcgtcagcgcccatgccctgcagaccatgttccagttaatgactcccaagcaaatgtacgagcacttcaaggggtacgagtatgtctcacacatcaactggaacgaggacaaagcggcagccatcctggaggcctggcagaggacatatgtggaggtggttcatcagagtgtcgcacagaactccactcaaaaggtgctttccttcaccaccacgaccctggacgacatcctgaaatccttctctgacgtcagtgtcatccgcgtggccagcggctacttactcatgctcgcctatgcctgtctaaccatgctgcgctgggactgctccaagtcccagggtgccgtggggctggctggcgtcctgctggttgcactgtcagtggctgcaggactgggcctgtgctcattgatcggaatttcctttaacgctgcaacaactcaggttttgccatttctcgctcttggtgttggtgtggatgatgtttttcttctggcccacgccttcagtgaaacaggacagaataaaagaatcccttttgaggacaggaccggggagtgcctgaagcgcacaggagccagcgtggccctcacgtccatcagcaatgtcacagccttcttcatggccgcgttaatcccaattcccgctctgcgggcgttctccctccaggcagcggtagtagtggtgttcaattttgccatggttctgctcatttttcctgcaattctcagcatggatttatatcgacgcgaggacaggagactggatattttctgctgttttacaagcccctgcgtcagcagagtgattcaggttgaacctcaggcctacaccgacacacacgacaatacccgctacagccccccacctccctacagcagccacagctttgcccatgaaacgcagattaccatgcagtccactgtccagctccgcacggagtacgacccccacacgcacgtgtactacaccaccgctgagccgcgctccgagatctctgtgcagcccgtcaccgtgacacaggacaccctcagctgccagagcccagagagcaccagctccacaagggacctgctctcccagttctccgactccagcctccactgcctcgagcccccctgtacgaagtggacactctcatcttttgctgagaagcactatgctcctttcctcttgaaaccaaaagccaaggtagtggtgatcttcctttttctgggcttgctgggggtcagcctttatggcaccacccgagtgagagacgggctggaccttacggacattgtacctcgggaaaccagagaatatgactttattgctgcacaattcaaatacttttctttctacaacatgtatatagtcacccagaaagcagactacccgaatatccagcacttactttacgacctacacaggagtttcagtaacgtgaagtatgtcatgttggaagaaaacaaacagcttcccaaaatgtggctgcactacttcagagactggcttcagggacttcaggatgcatttgacagtgactgggaaaccgggaaaatcatgccaaacaattacaagaatggatcagacgatggagtccttgcctacaaactcctggtgcaaaccggcagccgcgataagcccatcgacatcagccagttgactaaacagcgtctggtggatgcagatggcatcattaatcccagcgctttctacatctacctgacggcttgggtcagcaacgaccccgtcgcgtatgctgcctcccaggccaacatccggccacaccgaccagaatgggtccacgacaaagccgactacatgcctgaaacaaggctgagaatcccggcagcagagcccatcgagtatgcccagttccctttctacctcaacggcttgcgggacacctcagactttgtggaggcaattgaaaaagtaaggaccatctgcagcaactatacgagcctggggctgtccagttaccccaacggctaccccttcctcttctgggagcagtacatcggcctccgccactggctgctgctgttcatcagcgtggtgttggcctgcacattcctcgtgtgcgctgtcttccttctgaacccctggacggccgggatcattgtgatggtcctggcgctgatgacggtcgagctgttcggcatgatgggcctcatcggaatcaagctcagtgccgtgcccgtggtcatcctgatcgcttctgttggcataggagtggagttcaccgttcacgttgctttggcctttctgacggccatcagcgacaagaaccgcagggctgtgcttgccctggagcacatgtttgcacccgtcctggatggcgccgtgtccactctgctgggagtgctgatgctggcgggatctgacttcgacttcattgtcaggtatttctttgctgtgctggcaatcctcaccatcctcggcgttctcaatgggctggttttgcttcccgtgctttggtctttctttggaccatatcctgaggtgtctccagccaacggcttgaaccgcctgcccacaccctcccctgagccaccccccagcgtggtccgcttcgccatgccgcccggccacacgcacagcgggtctgattcctccgactcggagtatagttcccagacgacagtgtcaggcctcagcgaggagcttcggcactacgaggcccagcagggcgcgggaggccctgcccaccaagtgatcgtggaagccacagaaaaccccgtcttcgcccactccactgtggtccatcccgaatccaggcatcacccaccctcgaacccgaaacagcagccccacctggactcagggtccctgcctcccggacggcaaggccagcagccccgcagggacccccccagaaaaggcttgtggccacccctctacagaccgcgcagagacgcttttgaaatttctactgaagggcattctggccctagcaatagggcccgctggggccctcgcggggcccgttctcacaaccctcggaacccaacgtccactgccatgggcagctccgtgcccggctactgccagcccatcaccactgtgacggcttctgcctccgtgactgtcgccgtgcacccgccgcctgtccctgggcctgggcggaacccccgagggggactctgcccaggctaccctgagactgaccacggcctgtttgaggacccccacgtgcctttccacgtccggtgtgagaggagggattcgaaggtggaagtcattgagctgcaggacgtggaatgcgaggagaggccccggggaagcagctccaactgagggtgattaaaatctgaagcaaagaggccaaagattggaaaccccccacccccacctctttccagaactgcttgaagagaactggttggagttatggaaaagatgccctgtgccaggacagcagttcattgttactgtaaccgattgtattattttgttaaatatttctataaatatttaagagatgtacacatgtgtaatataggaaggaaggatgtaaagtggtatgatctgggccttctccactcctgccccagagtgtggaggccacagtggggcctctccgtatttgtgcattgggctccgtgccacaaccaagcttcattagtcttaaatttcagcatatgttgctgctgcttaaatattgtataatttacttgtataattctatgcaaatattgcttatgtaataggattattttgtaaaggtttctgtttaaaatattttaaatttgcatatcacaaccctgtggtagtatgaaatgttactgttaactttcaaacacgctatgcgtgataatttttttgtttaatgagcagatatgaagaaagcacgttaatcctggtggcttctctaggtgtcgttgtgtgcggtcctcttgtttggctgtgcgtgtgaacacgtgtgtgagttcaccatgtactgtactgtgatttttttttttgtcttgttttgtttctctacactgtctgtaacctgtagtaggctctgacctattcaggctggaaagcgtcaggatatcttttcttcgtgctggtgagggctggccctaaacatccacctaatcctttcaaatcagcccggcaaaagctaaactctcctcgtgtctacgggcatctgttatgatcattggctgccatccaggaccccaatttgtgcttcagggggataatctccttctctcggatcattgtgatggatgctggaacctcagggtatggagctcacatcagttcatcatggtgggtgttagagaattcggtgacatgcctagtgctgagccttggctgggccatgagagtctgtataataaaaaaagcatgcagcatggtgcccctcttttgaccaacacacacaagacccctcccccaacacccccaaattcaagagtggatgtggccctgtcacaggtagaaaaacctatttagttaattctttcttggcccacagtctcccagaaatgatgttttgagtccctatagtttaaagtccctctcttaaatggagcagctggtttgaggtttctaaatctgtttgcattttctttaaaattaagtggtgagcatgcattgtggtgtagaggcaggcattatgtaggataagagctccggggggattcttcatgcaccagtgtttagggtacgtgcttcctaagtaaatccaaacattgtctccatcctccccgtcattagtgctctttcaatgtgatgtgggaaagcaggaggatggacacaccccactgaaagatgtaggcaggggcaggtctctcaaccaggcatatttttaaaagttgcttctgtactggttctcttcttttgctctgaggtgtgggctccctcatctcgtaaccagagaccagcacatgtcagggaagcacccagtgtcggctccccatcccaatccacaccagcaccttgttacagacaagaagtcagaggaaagggcggggtccctgcagggctgaagcctaagctactgtgaggtgctcacaagtggcagctcctgtaatcccttttaaattacgtgggaatcttaacagaaagtaatgggcccccagaaatacccacagcataggacntcagaccctgaactcaccacaaaattttaagatgctgattgggagccgcttgtggctgctggatgngtgtgtgtgtgtgtgtgtgtgcgtgcgtgcgtgtgtgtgtgtgtctgntggggaccctggccacccccctgctgctgtcttggtgcctgtcacccacatggtctgccatcctaacacccagctctgctcagaaaacgtcctgcgtggaggagggatgatgcagaattctgaagtcgacttccctctggctcctggcgtgccctcgctcccttcctgagcccagctcgtgttgcgccggaggctgcgcggcccctgatttctgcatggtgtagaactttctccaatagtcacattggcaaagggagaactggggtgggcggggggtggggctggcagggaattagcatttctctctctcttttaatagttaa

SEQ ID NO: 267 - DNA, 4465 bp, Homo sapiens
gagctcacagagcccccagctggggcatatctggtttccgggggcaggggcgatacccagaggaggaagaagggattctgagagagcccaacaggctccgagcctcaggctggagctgagcttggggcagcaaggaaggaccaggtgcgagggcagaaccatgcggcccgacccctgcagcacggcctgtggcctcccccagctcctgcccgtgcttctgggtcagtctggactttgccacttctgaccaaaagccaccgcaaacccactcaagccaaaagaggaagtgaccgttaggcccaactgggaaggctggcggccaggggcactccaggcagggcgaggggggcggccgggggcgctccaggcggggcgagggagacacccagaactccaggcaggagtcctcgggtgccacctttcctctccacctggccctgcgtgggctctgtcctcagggtggcccgccgtagtccccctccccactctgagtttcctgtcccaaagtcctaaggaagtttccagaactacatctcaccatcttgagtcagccttggctcagtgtccatctcacaggcctggaaggggcaggagtcagcactgtccagaccacagggcctgagtgtggggagggcagccgtctaggaaggtggtggagggttgttaccttgaggcaagagggctgcggggcagaaagacacagcaggtgactgttgtgggaggcccaagagaggcctgggagagggatggcccacaagggctgaccctcccgccacccagggggccttggacaggtttcctcctggcagggtggcccttgtgcatggaacccctacaacgactaaggctggcaggcatgaggtttcctgaaggagaaagagcttgtggggcccagtgtggctgggggggcgctgggactccattctgaagccaaaggcactgggaagggcttccgcagaggagggtttggcaggggttgccaggaacagcctggatggggacagggaacagataaggtgggtggaggagttagccgggagcctggggctggctccagcatgatgtgggggtctgcaaggccctggagaaagtggggtggtgcagcagggggcacacccacagctggagctgacccagatggacagcttgggctctgccacgcgggactaggcaaggaaggggcacgaacaagcaggaagtggtgaggcggtctccagctagctgctctcccctgcccagactttggtttcctccctgctggcttggcctggctccctggctctgtgtggtatggtcacacccccgtgcaccccctccactgagatggggcggggagagcaccgaggctgctcttcctctcctgggccgtcctctgagcagcagacggggctaagcgttccccagctcgccttcacacacagcccgtgccaccacaccgacggtaccatgaaggacgaggtagctctactggctgctgtcaccctcctgggagtcctgctgcaaggtgggctggttcctatctaggaagagggtgggccttagatccctacagcttgccctctgccccctaggcccaggtggagggcagaggtggggactccagcccaggcccaagctggaagagggtggggactttcagggaactggggggcacctggctgtgagagctgtaggacttgggggtggcaagggtgccaggacaaatggtaggatagccatgggcttggggaagctgatctctgctctttccagctgtcccctctctgggcgtcccagcaagcggcccccattccctggctctgcttcaaaggcacctccatactgggaccacgtggagcagggtagaggtgggactccttcctccagccccctaaaaagagcctgcttaatgcctttctcagactggccctaaaggacacattccttggccagatatccttgccacctaagagacaccactactccacagtgtgtgggctaggataaggcacagcctggggagggggctctgaaggggctgaacagacaggccagcctgacctccagctgctcctgcactgagctggatggccaccctgtgacacccatctgcagagggcccagaaccaaaggtgccagggctgcaggactcagggggagatggtccgacgggaggtctggggagggagcgcacagccagcactggtctgtgtgtggtctggcctggcctcacctgaccaagagaagggctcctgcccacagagaaactttagggccagcccaccctctgcaactaccccagccctggggtcctggggttaggctaggagagtcccagctgcaacctcctgggagcaggagagaaggtgtctgtcagatttaggcctgggaccggaatgcaggaacagagaaactgaggtttggaggcacagggacgcaggctttagtgatcccggcctgaggcagggtcagagggccctgctggtgggcgctggtaggtgggtgaccagggactgttagctacagggagtgtgcttccttgcacctgggaggatgcagccagctctgccctcagactcccgaggcacttcctggccagggacctgaaagctgcatttgcctgtgttttgagagtgaaatgattcagaaacaaggactcaagtggtctctctcgcggagcaggtgtccctgtgcctgaatcactcaccctcccccatacactcacaggttgggacagggcctctctgcgccccaggcttcagccctgccctcctcgctgaatgtcagggacacagggcaggccagggatgggtgagacgagaggtctcctcgggcggggagggggcggggttccgccttagggaggagaggacacggccaagtgaagggccagattgcaggatccctcccactcccatctctggggcttcgggtgtccagacctgactcccgctccccctcctcccccagcctacttctccctgcaggtgatctcggcgcgcagggccttccgcgtgtcgccgccgctcaccaccggcccacccgagttcgagcgcgtctaccgagcccagtgaggcgcggcgggagggcgcggggcggggagcgagccccaggcgggtccgggtcgcaggaccatcccggccggcgcgctcatcccacccgcccaccgcagggtgaactgcagcgagtacttcccgctgttcctcgccacgctctgggtcgccggcatcttctttcatgaaggtcggggtgtggggcaggggcgcacgcgctggacccccgggacccgcgcagggcgctcaccaggcccgtgcgtacctctcgcaggggcggcggccctgtgcggcctggtctacctgttcgcgcgcctccgctacttccagggctacgcgcgctccgcgcagctcaggtgagggccgggcggggagcggggcggggccggggaaagatcgcgggcgggcggggctcctggggagcgggaccgaagctgggggcgggcgacgggccggagcccagcgcctttggggattcggtgggcgagccctggcggcggccagaggaagtccccgtggggccagggttgcggcggggaagaagcgggcctcctcgcgccacctccccgctgaccgccgcccgcaggctggcaccgctgtacgcgagcgcgcgcgccctctggctgctggtggcgctggctgcgctcggcctgctcgcccacttcctcccggccgcgctgcgcgccgcgctcctcggacggctccggacgctgctgccgtgggcctgagaccaaggcccccgggccgacggagccgggaaagaagagccggagcctccagctgccccggggaggggcgctcgcttccgcatcctagtctctatcattaaagttctagtgaccgagacccgggctgcgttctctgggtccgcgggggtggcgcaccgcgggctacggagcctggaggggcccagcccgagtccgggcagcccggggcgggcttcctagtggcggcgtgagagtggctgcgaaggaacgagccctccccctggggcgggactggatccggtcttcacctcctaccccactccctactcagcctcggggtcacaaggccgcccagtcctgccggggttcaccctcctagcgctcagcggtctcctcaccggtccccctcctcaggggccttccctcgactctcagccgccgcagtccctcgtcccctggccttcacagctgacactagatagagcctgtggctctctccccaggtgagggcaggggtttttcttttggtcagcactggatccccctcgttaactgtaggtgttcagggcagccctccgaggtccgcagagctgcgggcaccatgggaacgaagtgagtcagtgacaggcggtctcaaggaaatgtccagaagccttggggatccaggggaggcccacagaaacaaagaagtgacttttagccaagtatgcaggagaaacggaggag

SEQ ID NO: 268 - DNA, 2010 bp, Homo sapiens
atgcgcggaggaggctttggggaccgggaccgggatcgtgaccgtggaggatttggagcaagaggtggtggtggccttcccccgaagaaatttggtaatcctggggagcgtttgcgtaaaaaaaagtgggatttgagtgagctccccaagtttgagaaaaatttttatgtggaacatccggaagtagcaaggctgacaccatatgaggttgatgagctacgccgaaagaaggagattacagtgagggggggagatgtttgtcctaaacccgtgtttgccttccatcatgctaacttcccacaatatgtaatggatgtgttgatggatcagcactttacagaaccaactccaattcagtgccagggatttccgttggctcttagtggccgggatatggtgggcattgctcagactggctctgggaagacgttggcgtatctcctgcctgcaattgttcatattaaccaccagccatacttggaaaggggagatggcccaatctgtctagttctggctcctaccagagagcttgcccagcaagtacagcaggtggccgatgactatggcaaatgttctagattgaagagtacttgtatttatggaggtgctcctaaaggtccccagattcgagacttggaaagaggtgttgagatctgcatagccactcctggacgtctgatagatttcctggagtcaggaaagacaaatcttcgccgatgtacttaccttgtattggacgaagctgacagaatgcttgatatggggtttgaaccccagatccgtaaaattgttgaccaaatcaggcctgataggcagacactgatgtggagtgcaacctggccaaaagaagtaagacagcttgcagaggatttccttcgtgattacacccagatcaacgtaggcaatctggagttgagtgccaaccacaacatcctccagatagtggatgtctgcatggaaagtgaaaaagaccacaagttgatccaactaatggaagaaataatggctgaaaaggaaaacaaaacaataatatttgtggagacaaagagacgctgtgatgatctgactcgaaggatgcgcagagatggttggccagctatgtgtatccatggagacaagagtcaaccagaaagagattgggtacttaatgagttccgttctggaaaggcacccatccttattgctacagatgtagcctcacgtgggctagatgtggaagatgtcaagtttgtgatcaactatgactatccaaacagctcagaggattatgtgcaccgtattggccgaacagcccgtagcaccaacaagggtaccgcctataccttcttcaccccagggaacctaaaacaggccagagagcttatcaaagtgctggaagaggccaatcaggctatcaatccaaaactgatgcagcttgtggaccacagaggaggcggcggaggcgggggtggtcgttctcgttaccggaccacttcttcagccaacaatcccaatctgatgtatcaggatgagtgtgaccgaaggcttcgaggagtcaaggatggtggccggagagactctgcaagctatcgggatcgtagtgaaaccgatagagctggttatgctaatggcagtggctatggaagtccaaattctgcctttggagcacaagcaggccaatacacctatggtcaaggcacctatggggcagctgcttatggcaccagtagctatacagctcaagaatatggtgctggcacttatggagctagtagcaccacctcaactgggagaagttcacagagctctagccagcagtttagtgggataggccggtctgggcagcagccacagccactgatgtcacaacagtttgcacagcctccaggagctaccaatatgataggttacatggggcagactgcctaccaataccctcctcctcctccccctcctcctccttcacgtaaatgaaaccactcaagtggtagtgactccagcagacttaattacattttaaggaacactgtc

SEQ ID NO: 269 - DNA, 3394 bp, Homo sapiens
gaattccgacttgttttgtggtctaacatatggtctatgctgcagaatggtccatgtgctgatgagaagaatgtatattctgcagctgttggaagaaagggtctgtaaatgtctgttaggtccatttggtctataatgcagattaagtctgatgtttctttctagatgatctgcccaatactgaaagtgaggcattaaaatcccctgcctttttttgtattaggatctgcctctctctttagctctaatagtgtttgtttatacatgtgagtactttggtattgggtgcatatatatttaaaattgttacatccttttgctgaattgatccctttttcattatgtaatgatcttctttgtccctttttatgttttctgacttagtctattatgaataagtggcgcctgcagacggcccctggaagggctctggtggggctgagcgctctgccgcgggggcgcgggcacagcaggaagcaggtccgcgtgggcgctgggggcatcagctaccggggtggtccgggctgaagagccaggcagccaaggcagccaccccggggggtgggcgactttgggggagttggtgccccgccccccaggccttggcggggtcatggggcccccccattctgggccggggggcgtgcgagtcggggccctgctgctgctgggggttttggggctggtgtctgggctcagcctggagcctgtctactggaactcggcgaataagaggttccaggcagagggtggttatgtgctgtaccctcagatcggggaccggctagacctgctctgcccccgggcccggcctcctggccctcactcctctcctaattatgagttctacaagctgtacctggtagggggtgctcagggccggcgctgtgaggcaccccctgccccaaacctccttctcacttgtgatcgcccagacctggatctccgcttcaccatcaagttccaggagtatagccctaatctctggggccacgagttccgctcgcaccacgattactacatcattgccacatcggatgggacccgggagggcctggagagcctgcagggaggtgtgtgcctaaccagaggcatgaaggtgcttctccgagtgggacaaagtccccgaggaggggctgtcccccgaaaacctgtgtctgaaatgcccatggaaagagaccgaggggcagcccacagcctggagcctgggaaggagaacctgccaggtgaccccaccagcaatgcaacctcccggggtgctgaaggccccctgccccctcccagcatgcctgcagtggctggggcagcaggggggctggcgctgctcttgctgggcgtggcaggggctgggggtgccatgtgttggcggagacggcgggccaagccttcggagagtcgccaccctggtcctggctccttcgggaggggagggtctctgggcctggggggtggaggtgggatgggacctcgggaggctgagcctggggagctagggatagctctgcggggtggcggggctgcagatccccccttctgcccccactatgagaaggtgagtggtgactatgggcatcctgtgtatatcgtgcaggatgggcccccccagagccctccaaacatctactacaaggtatgagggctcctctcacgtggctatcctgaatccagcccttcttggggtgctcctccagtttaattcctggtttgagggacacctctaacatctcggccccctgtgcccccccagccccttcactcctcccggctgctgtcctcgtctccacttttaggattccttaggattcccactgccccacttcctgccctcccgtttggccatgggtgcccccctctgtctcagtgtccctggatcctttttccttggggaggggcacaggctcagcctcctctctgaccatgacccaggcatccttgtccccctcacccacccagagctaggggcgggaacagcccaccttttggttggcaccgccttctttctgcctctcactggttttctcttctctatctcttattctttccctctcttccgtctctaggtctgttcttcttccctagcatcctcctccccacatctcctttcaccctcttggcttcttatcctgtgcctctcccatctcctgggtgggggcatcaaagcatttctccccttagctttcagccccccttctgacctctcataccaaccactcccctcagtctgccaaaaatgggggccttatggggaaggctctgacactccaccccagctcaggccatgggcagcagggctccattctctggcctggcccaggcctctacatacttactccagccatttggggtggttgggtcatgacagctaccatgagaagaagtgtcccgttttgtccagtggccaatagcaagatatgaaccggtcgggacatgtatggacttggtctgatgctgaatgggccacttgggaccggaagtgacttgctccagacaagaggtgaccaggcccggacagaaatggcctgggaagtagcagaagcagtgcagcaggaactggaagtgccttcatccaggacaggaagtagcacttctgaaacaggaagtggtctggctggaactccaagtggcttagtctgggggatcaggaggtgggaggtggatggttcttattctgtggagaagaagggcgggaagaacttcctttcaggaggaagctggaacttactgactgtaagaggttagaggtggaccgagaaggacttttcccagtcttcagtggcacttcccaagatctcccttcccttgtgctctgtgctgattttaggacagctaagatgactgccatgtgctgtggcaggcctaatttgtcttgttctttcctttccatatcccagtataatctctgttaatcaacaggactaccccaagaacccatgtgctctcccgagtaacccagatggctgtcttgttcattccatcctacatttctgactcctttcagactcaacacagttcccttcttagtgaccaaaatggtggcctactggctggtctagctgacagtggtacttagcaaaggccactgtttccatagtgaccagctgatacctcttcctgccctctagtgtgcaattgggtgttgcctcagtttcctcccagctcagttttattagatcaaagctgttgttgggcaccaggttggccacctcaatcaccagccaagatggttgctttgtccaccagaggtcaagttcacctctctggtgctgtagttcccagctccttcctgatttttctaatcgctccttctggggaacaggaagttgatattgccatggtggcggggtatgccgtcacctcagtagttttactgtaaaagggaaatttgaaggaattc

SEQ ID NO: 270 - DNA, 2303 bp, Homo sapiens
cccggcgtcccgtcgagcccagccccgccgggggcgctcctcgccgcccgcacgccctccccagccatgtcgtccatcctgcctttcactcccccgatcgtgaagcgcctgctgggctggaagaagggcgagcagaacgggcaggaggagaaatggtgcgagaaggcggtcaagagcctggtcaagaaactcaagaagacggggcagctggacgagctggagaaggccatcaccacgcagaacgtcaacaccaagtgcatcaccatccccaggtccctggatggccggttgcaggtgtcccatcggaaggggctccctcatgtcatctactgccgcctgtggcgatggccagacctgcacagccaccacgagctgcgggccatggagctgtgtgagttcgccttcaatatgaagaaggacgaggtctgcgtgaatccctaccactaccagagagtagagacaccagttctacctcctgtgttggtgccacgccacacagagatcccggccgagttccccccactggacgactacagccattccatccccgaaaacactaacttccccgcaggcatcgagccccagagcaatattccagagaccccaccccctggctacctgagtgaagatggagaaaccagtgaccaccagatgaaccacagcatggacgcaggttctccaaacctatccccgaatccgatgtccccagcacataataacttggacctgcagccagttacctactgcgagccggccttctggtgctccatctcctactacgagctgaaccagcgcgtcggggagacattccacgcctcgcagccatccatgactgtggatggcttcaccgacccctccaattcggagcgcttctgcctagggctgctctccaatgtcaacaggaatgcagcagtggagctgacacggagacacatcggaagaggcgtgcggctctactacatcggaggggaggtcttcgcagagtgcctcagtgacagcgctatttttgtccagtctcccaactgtaaccagcgctatggctggcacccggccaccgtctgcaagatcccaccaggatgcaacctgaagatcttcaacaaccaggagttcgctgccctcctggcccagtcggtcaaccagggctttgaggctgtctaccagttgacccgaatgtgcaccatccgcatgagcttcgtcaaaggctggggagcggagtacaggagacagactgtgaccagtaccccctgctggattgagctgcacctgaatgggcctttgcagtggcttgacaaggtcctcacccagatgggctccccaagcatccgctgttccagtgtgtcttagagacatcaagtatggtaggggagggcaggcttggggaaaatggccatacaggaggtggagaaaattggaactctactcaacccattgttgtcaaggaagaagaaatctttctccctcaactgaaggggtgcacccacctgttttctgaaacacacgagcaaacccagaggtggatgttatgaacagctgtgtctgccaaacacatttaccctttggccccactttgaagggcaagaaatggcgtctgctctggtggcttaagtgagcagaacaggtagtattacaccaccggcaccctccccccagactctttttttgagtgacagctttctgggatgtcacagtccaaccagaaacgcccctctgtctaggactgcagtgtggagttcaccttggaagggcgttctaggtaggaagagcccgcacgatgcagacctcatgcccagctctctgacgcttgtgacagtgcctcttccagtgaacattcccagcccagccccgccccgttgtgagctggatagacttgggatggggagggagggagttttgtctgtctccctcccctctcagaacatactgattgggaggtgcgtgttcagcagaacctgcacacaggacagcgggaaaaatcgatgagcgccacctctttaaaaactcacttacgttgtcctttttcactttgaaaagttggaaggactgctgaggcccagtgcatatgcaatgtatagtgtctattatcacattaatctcaaagagattcgaatgacggtaagtgttctcatgaagcaggaggcccttgtcgtgggatggcatttggtctcaggcagcaccacactgggtgcgtctccagtcatctgtaagagcttgctccagattctgatgcatacggctatattggtttatgtagtcagttgcattcattaaatcaactttatcatatgctcaaaaaaaaaaaaaag

SEQ ID NO: 271 - DNA, 990 bp, Homo sapiens
ggctgtgccaggtgcacatttagcacccgttgccttctctaggagccgctcctagcttgccttatcacatccacgtgacccctcagagcacagcagcttctgattctccatcctattttcttctcttgactgatacatttgggcacttctagggaattcagaaaccaagggaaggggggaagtgctggcttttgctcctgcccagctgaaaggcttgaaaacagttcagtaattctgggcaggtttctctccttaaattaaaatccaatatgggcccctctgtacttaacattccaaatgctcattccaaacactttgccaacgaaggcaaacagtagagaagttaaatacagtgctgcccttgaggctctccaagggaaaggcgaatgaatattctccaggccctctgcttattcctctctgcctattgtgaaggcaatcaggccagactattgagggcatctggcagcaggactcaggcaggtatgaagtagccagccacaagtgtgaaaaggaagagtgctgagagaaactgcctagtcatgtgatatccctaatgcactgtgctttcttccctcaagaaccaccccttctggttccgctgcatgtacatgctgatctggggcaagtttgtgctgtacaaatatgtcacctgttggctggtcacagaaggagtatgcattttgacgggcctgggcttcaatggctttgaagaaaagggcaaggcaaagtgggatgcctgtgccaacatgaaggtgtggctctttgaaacaaacccccgcttcactggcaccattgcctcattcaacatcaacaccaacgcctgggtggcccggtgagctgctggtggggagcctggaccctggttccttccttccactgtcttcccagattggagggcaggggtgtaccatgtcacccctatgcgtctttcccatctgggcagaaccccctgtcgctcacactgactttgacccccacctatacccc

SEQ ID NO: 272 - DNA, 2100 bp, Homo sapiens
ctaaagcaaatggttatgagccttagagtttctgaactccaagtactgttgggctacgccgggagaaacaagcacggacgcaaacacgaacttctcacaaaagccctgcatttgctaaaggctggctgtagtcctgctgtgcaaatgaaaattaaggaactctataggcggcggttcccacagaaaatcatgacgcctgcagacttgtccatccccaacgtacattcaagtcctatgccagcaactttgtctccatctaccattccacaactcacttacgatggtcaccctgcatcatcgccattactccctgtttctcttctgggacctaaacatgaactggaactcccacatcttacatcagctcttcacccagtccatccggatataaaacttcaaaaattaccattttatgatttactggatgaactgataaaacccaccagtctagcatcagacaacagtcagcgctttcgagaaacctgttttgcatttgccttgacaccacaacaagtgcagcaaatcagtagttccatggatatttctgggaccaaatgtgacttcacagtacaggtccagttaaggttttgtttatcagaaaccagttgtccacaagaagatcacttcccacccaatctttgtgtgaaagtgaatacaaaaccttgcagccttccaggttaccttccacctacaaaaaatggcgtggaaccaaagcgacccagccgaccaattaatatcacctcacttgtccgactgtccacaacagtaccaaacacgattgttgtttcttggactgcagaaattggaagaaactattccatggcagtatatcttgtaaaacagttgtcctcaacagttcttcttcagaggttacgagcaaagggaataaggaatccggatcattctagagctttaattaaagagaagttgactgcggatccagacagtgaaatagctacaaccagcctaagggtttctctactatgtccacttggtaaaatgcggctgacaattccgtgtcgggcccttacatgttctcatctacaatgttttgacgcaactctttacattcagatgaatgagaaaaaaccaacctgggtttgtcctgtctgtgataagaaggctccatatgaacaccttattattgatggcttgtttatggaaatcctaaagtactgtacagactgtgatgaaatacaatttaaggaggatggcacttgggcaccgatgagatcaaaaaaggaagtacaggaagtttctgcctcttacaatggagtcgatggatgcttgagctccacattggagcatcaggtagcgtctcaccaccagtcctcaaataaaaacaagaaagtagaagtgattgacctaaccatagacagttcatctgatgaagaggaagaagagccatctgccaagaggacctgtccttccctatctcccacatcaccactaaataataaaggcattttaagtcttccacatcaagcatctccagtatcccgcaccccaagccttcctgctgtagacacaagctacattaatacctccctcatccaagactataggcatcctttccacatgacacccatgccttacgacttacaaggattagatttctttcctttcttatcaggagacaatcagcattacaacacctccttgcttgccgctgcagcagcagcagtttcagatgatcaagacctcctacactcgtctcggtttttcccgtatacctcctcacagatgtttcttgatcagttaagtgcaggaggcagtacttctctgccaaccaccaatggaagcagtagtggcagtaacacgagcctggtttcttccaacagcctaagggaaagccatagccacaccgtcacaaacaggagcagcacggacacggcatccatctttggcatcataccagacattatttcattggactgattcccaggccctgctgctcccatccccaccccagatcgaatgaacttggcagaaagaagagaactttgtgctctgttttaccttactctgtttagaaaagtatacaagcgtgttttttttcctttttttggcaaaattaaaagaaatgtacagagaacaaaa

SEQ ID NO: 273 - DNA, 167343 bp, Homo sapiens
atctaccatgatcaagtgggcttcatccctgggatgcaaggctggttcaatatacgcaaatcaagaaatgtaatccagcatataaacagaaccaaagacaaaaaccacatgattatctcaatagatgcagaaaaggcctttgacaaaattcaacaacccttcatgctaaaaactctcaataaattaggcattgatgggacgtatctcaaaataataagagctatctatgacaaacccacagccaatatcatactgaatgggcaaaaactggaagcattccctttgaaaactggcacaagacagggatgccctctctcaccactcctattcaacatagtgttggaagttctggccagggcaattaggcaggagaaggaaataaagggtattcaattaggaaaagaggaagtcaaattgtccctgtttgcagacgacatgattgtatatctagaaaaccccattgtctcagcccaaaatctccttaagctgataagcaacttcagcaaagtctcaggatacaaaatcaatgtacaaaaatcacaagcattcttatacaccaataacagacaaacagccaaatcatgagtgaactcccattcacaattgcttcaaagagaataaaatacctaggaatccaacttacaagggatgtgaaggacctcttcaaggagaactacaaacaactgctcaatgaaataaaagagggtacaaacaaatggaagaacattccatgctcatgggtaggaagaatcagtatcgttaaaatggccacactgcccaaggtaatttatagattcaatgccatccccatcaagctaccaatgactttcttcacagaattggaaaaaactactttaaagttcatatggaaccaaaaaagagcccacatcaccaagtcagtcctaagccaaaagaacaaagctggaggcatcacgctacctgacttcaaactatactgcaaggctacagtaaccaaaacagcatgttactggtaccaaaacagagatatagatcaatggaacacaacagagccctcagaaataacgccacatatctacaactatctgatctttgacaaacctgagaaaaacaagcaatggggaaaggattccctatttaataaatggtgctgggaaaactggctagccatatggagaaagctgaaactggatcccttccttacaccttatataaaaattaattcaagatggattaaagacttaaacgttagacctaaaaccataaaaaccctagaagaaaacctaggcattaccattcaggacataggcatgggcaaggacttcatgtctaaaacaccaaaagcaatggcaayaaaagccaaaattgacaaatgggatctaattaaactaaagagcttctgcacagcaaaagaaactaccatcagagtgaacaggcaacctacaaaatgggagaaaattttcgcaacctactcatctgacaaagggctaatatccagaatctacaatgaactcaaacaartttacaagaaaaaaacaaacaaccccatcaaaaagtgggcaaaggacatgaacagacacttctcaaaagaagacatttatgcagccaaaaaacacatgaaaaaatgctcaccatcactggccatcagagaaatgcaaatgaaaacyacaatgagataccayctyacaccagttagaatggcaatcattaaaaagtcaggaaacaacaggtgctggagaggatgtggagaaataggaacacttttacactgttggtgggactgtaaactagttcaaccattgtggaagtcagtgtggcgattcctcagggatctagaactagaaataccatttgacccagccatcccattactgggtatatacccaaaggactataartcatgctgctataargacacatgcacacgtatgtttattscggcactattcacaatagcaaagacttggaaccaacccaaatgtccaacaatgatagactggattaagaaaatgtgkcacatatacaccatggaatactatgcagccataaaaaatgatgarttcatgtcctttgtagggacatggacgaaattggaaatcatcattcacagtaaactatcgcaagaacaaaaaaaccaaacaccgcatattctcactcataggtgggaattgaacaatgagaacatatggacacaggaaggggaacatcacactctggggactgttgtgggtkgggggaggggggmgggacagctttaggggacatacctaatgctaaatgacgagttaatgggtgcagcacaccagcatggcacatgtatacatatgtaactaacctgcacattgtgcacatgtaccctaaaacttaaagtataataataataaaatttttaaaaaaggaaaaaaaaaagaaagtcagttttgctagatatatagtccttggcatgcattttctttctttgagtatcttaaatatgttctcatatttttttctaatattaaacattgctattaaaaacactgataaaatctaattttctttccttgtaagtcacttgttcttttcctagatcccaaaggtttgcttgtagtctaaatattttccagaatatgtctgttgttcattgttctgggtcagtattctcaagtgtacactgtgttcttttagtgtgtagtttcgtgtctcttcattttagcaattatagtatttagtaattgaatattatgagtgttaattattattctcacttggttttctgtgatgccacataagattcccttatgtggcatcttgcttatctgtcttcaacatttgttaggttcttttgaattgtttaaatctcttcatttctttttggtattttttattaatctactcttgtgtttctattacaggttgagtgtcccttatgtgaaatacttgggaccaaagtgtttcagacttcagactttttccgattttggaatattgctgattgagcatcccaaatccaaaatccaaagtaatccagtgagcatttcctttaagcgtcatgtttgcctcaaaaagctgcagattttagaccatttctgacttcaggttttcagatttgggatggtcaacatgtagtttagtcttcatttccaaaatgatgttttcttttatttctaattctttattgagttttgtcacctcatttataagctttgctggtttttcatgtatgtacctctttcatgtttgtataacttttaaatctttttagcttatttgaaattctggtgtattgttggcatgctttcactctctatatgacattgtatttctaatttgtaacagctctttttattctcttaatcttttattttgtagcaatctcttctcatttcttagctatactatcttatttttctaacgatagtaaggacaagctgttcttaaagttttcttctacctgcctaatttatttcttctaatttccctgcctgctcctctgcccccacttgaggcctttattattttagagacttttctcaaatttatggtagtccttggctattggctcatgtttaagagttgaacgattaaaaaaactaattagaaagtctatgtgccatgggtagggcttgttcacttccacactttaccataaagtaatctgattgagctgtttctttgtggaatcctctgcgttagaatcttttcattaattttttttctttgaggctgatcggattcttcagagaagattctttcagccccctaccctgaggggaataagcttactcatagtgctttggcagccaaatgaggagaggaacattgttcctctgtaaatttttgtttaggaaggctgtctcagttgatggtttcccgtagtccagactttcatttttactccctccagagaacaacctctggtagcatacctgagaggagaagggacatctgctgagctatatggaaggaatgaggagatctggaaggttctaagtatctcgtctcttttttcaacagttcctcttgtttttaggttgattcaacttcctgatacacctgttgttttcagttgccatattttttgtgggttctgcagtagaaattaaacgtttgcattgaactttcctgggcctatgaagtcagttatcatttgtctgtctactttctaaaatgccttgctattgtctcttctctcattctctttgtcttaagggtgtgtgtgtgagagtgtgtgtgtgtgtgtgtgtgtgtgtgtgtgtgtgtgtgtgagaagccctgttcagtgttgtttcaggagagagaggagaggctaatggcatgcattcatttcaccccagtacttggacctgtattgtacagtgaatgtcagggaagttactcttcaggtctcctgattcttttggagcaaatgataaaacgtttttctgttgacacattttgggcgacatagcaagaccatgtctctattttttttttttttttaaaaaaagaaatggctgagcacggtggctcatgcctgtaatcccagcactttgggaggccgagttgggcctatcacaaggtcaggagattgagaccatcatggccaacatggtgaaaccccatctctactaaaaatacaaaaattagccgggcatggtggtgggcgcctgtaatcccagctacttaggaggctgaggcaggagattcgcttgaacccgggaggtggaggttgcagtgagccgagatggcgccatagcactccagcctggtgacacagtgagactctgtctcaaaaaaagtaaaaataaaaacagagaaatggtcataaaggaatcctatgaacaattatatgccagtaaattaaaccatttggatcaaatggacaaattactagaaaggaatgctgtagaacatgaagaaatgttcacctggtagttgacattgtgatccatttgcaggctgttaccttctcctctcaaggatgcagtggaagtctcaacctggagaagatgctatacaatgcaagaggtgaactctgcccttagtaaaatccagctggtgggatattctcagaaaattgtgagtattcatattacatttcagttattcatgaatgctttccattcatattgttgtttgttgtttggaagaatcctatagttacgtttttaaagccattccattgctgaggatccagagcctctgttctttcctccgttccgcgcaggattttattggtgctctttccccaccctcacatctccatcaccagccagcattcgattggccagcgtgcagggagtccggagaaaggcgtctcatcctgttcacattagattttatagattttggatgggtgaaacgggaagagagaagagtttgtcaagtgtgacttttgagctctgacctaaatgataagccttcccatttcttactgtcatcctgtgcccagagctactcagtaccgaacaacaagggcctaacacctaactgaaaatgaaaaaggaaagccaaagtgtgtgagtctttggtctgtttggtaatatttcatctctcccttttaatgtgtgaaccttgagtgcctggggacatggaagagagctgaagctctcaggtgacaagtaaatattataggattgctttctttgtctgccagttgatctgcatcatctttctgttttccttaaaactttctagtttactttattgattgattgactgagacaaggtcccactttgttacccaggctggagcgcagtggtacaaacatggctcactgcagcctcaacttcccgggctccagtgatcctcctgccccaagtagctgcttgaggactacaggcatgtgccaccatgcccagctaatttttgtatttttttgtagagacagggtttcaccatgttgcccaggctggtcttgaactcctggcctcagcctcccaaagtgctgggattacaggcgtgagccattgcacccagtctctggtttactttaaaataatttttgtttttaaactgaggatatttctgttgtttttccctgcagaattacctcatgtgactgtcactgtaagctcattgcacattcttactgtggttctcttttaggagctttttggtgcggtccaggtgactcctctgagctctggctatgcccttgggagctccaactggatcatccagtctcattacgagaaagtgtcttatgtctctggatcctccttgcttaccacacacccccaggtaattccaaattctcttctagcaactcagctttttggttacttaagtcaaattcagaatgtatccaaggaaccatcagccatttttaaatcttccaaatatggttttctacagatactctctagccaaggtagactatttgagtctcaacattttgacctacaggtttctctgaaatagtcctgctaccttgagggtcactcctaggattctgaaatcccccaggccttccaaagaccatagcctgatgtgggacacagatggttatgcatttactcagcaaatattaactgtttaaaatccttcccaagggccaagtgtcaagtgtcatgcacacatctgggtattggggattcagtggtgaccaacgggcaaagcatgtgcccgtagatcttatgttgtaggggagttgatgatgttggggagaggatggtgtatagtaggtaaacaaataaagtgcctggtcatttccgattgagatacaagtactgaaaacagtaaagcagggtgattttcagaatgatggccattggtttagattgggtgcccaggaaagccaatgggaagatctcacttgaactgagacctggagagataaaccatgtcggctgggcgcggtggctcatacctgtaatcccatcattttgggaggccgaaatgggataactgcttgagcctaggagttcaggaccggcctgggcaatatggcaaaactctgtctctacaaaaaatacaaaaattacccgggtgtggtggcacacgctgtggtcccagctactcaggaagctaaggcagaaggatcgcttgagcctgggaagcggaggttgcagtcagccgagattgcgccaccgcactccagtgcgggtaacagagtgagattatgcctcaagaaaaaaaaaaaaaggccgggtatggtggctcatgcctgtaatcccagcactttgggaagccaaggcgagtggatcactttaggtcaggagttcaagaccaacctggccaacatggtgaaaccccatctctactaaaaatacaaaaattaggtgtgatggtgtgcacctataatcccagctacttgggaggctgaggcgggagaatcacttgaactcgggagacagaggttgcagtgagctgagatcatgctgctgtacccagcctgggtgacagagtgagactccatctcaacaaaaaaaaaaaaaaagagagagaaagaaaaaagaaaaacagagaaattagccacgtaaagccgtgagtgtttgtattacaaagggatggccagtgaagggcccctaaagtaagaataagctgggcatgtttgaagggcagagaaggctattgtggtcacagcgtggaggtcagcagtgaggtccaagagagtggcagacaccatgtcatgtagtgttagcaggctgtgaggaggaattttggttttattttaatatggagagggaaactattggaacgttttaagttattcattccagtcatatttggcaagaagcctagcacatataaacattgttatgaatgtgatacttactcctttttggtatttgtaaataatttactgttcatttcctgaatgttggttatttctatgtttgtaatagggagtggggggacattagttagctgttgaatgggtatatagatacattaggtaacttgtggaagtccatattacatttgtttatctacatctatttacggagagagagagagagagagaaggtcttgttctgtcacccggactggagtacagtggtgtagtcatagctcactgtaatctcaaactcctgggctcaagcaatcctcccaagtagctaggactatagccaccacacctggcctatttattttttaacataacctcaaatttttattgtcttcataataaaaccaaaaatgaagctaagaactggatcacttggccttttctccttttatcccttcccagttaaaaatacttgtatctcttagtagccagcattctcctagatctgcagttgggcccaacacttaagctttagcacaatctcgtttgtagttttagcctttttccagaagattggcttggtctgcctacatagccaccccttcctgccattaagccactttcccttggcatacagatcatcttttcccttcttgtaccatgtcactctgtggggttggtgccaaccatgcttcttacacaaagtccagtgggtttgaagaacattcaccatgttagagcactatcagtaaagaaagaaagaaattattcattttttaattacaaataaaaattgtatatatttatggtatgcatgatgtcttgatatgtgcatgcattatggaatggctaagtcaataattaacagaccccattttaatacagggagaaccatgctgtgctctagtgttgaacaataggatgtctgagctgccattctgtattatttctttataccttcttttatagccaagtttcatctcaagatctagaggggacgttgctattttttcctgcatctggcggaattctgggcccttcctggttattgaaatcaaaagcccatcaatgtcaccatcatctgcttcattgaatcaaaattttttattggcagcttctatcgttcctgatatgttcttccataaaagacagaaagatgacttggttgccaactctcgcgatttgtcctgcttagttcaaagcctttacagtactattgatgtaatttccagtaaattattcttacaaggtccataaatttaaagggaaaataatgtcttgaaagtaatgagcaacatacctaagtaattaattttaatttttagctggcaacctgtgttatatgtaaaaaagaaaaaaattagatttttctctacccacgtaattggattgtgtattgaattggcagggatgagaaaagttttggtttgaaaaacttgatagactaatgcagatgttagcaaactgtggcctgggcactaaatgtagcatgccacctattttggcatataatattttgttgaagtacagccacacccacttgtttatggaatgtttatggctgaatatacaccgtaggctggacaaggtggctcatgcctgtaatcacagcattttgggaggccaaggcaagatgattgcttgagcccaggaattggagaccagcctgggcaacatggcaagatcccatctctacgaaaagttaaaataaaataaaaaaaagccaggtgcggtggcatgcgcctgtggtcccagctactcgggaggctgaggcatgaggatttcttcagcctgggaggttgaggctgcagtgagccatgtttgtgccattgtactctagcctgggcaacagagcaagaccctgtctcaaaaaaaaaaaaaaagttataatggcagaattctactttaaatgttagagcaaactttgctaacccctggtctacttgagtacaatctttactaactaggaagaatatcacaggctgctgtagaattctgataaacatggggaaataaggctttggattaagcctgaggcagtaagaatggagaaaagagttaaaacattggcgggtctttaatgcaagaaacatttgttgaatgcccactgtcttcagaaaagaaagaataaaagttacagatcttatgtctgcatgacattgagaatggtgttaatggccattccagttaacaaggaagagttggcagagggacatttgttgcagaagagggtagtaggtttcatgaatgtgaatttgagagaacattagacagatgtaaatatggggctggaactgggatgtggaggcaagtctggagacaaactggagagttgtcacgttttaaaaatctaaccgggcacggtggcacacacctgtaatcctagcactttgggagaccaaggcaggcagatcacaaggtcaggagttcaagaccccaacatggtgaaaccccatctctactaaaaatacaaaaattaaccggtgtgatggtgctcacctgtaatcccaaatactcgggaggctgaggcaggagaatcgcttgaacccaggaggtggaggttgcagtgagccgagatcgcactattacacttcagccagggcaacagagagagactccgtctcaaaaaaaaaaaaaaaatctaaataaagggctgagggccaaagactgatccatagggaacttttaccaacagacagtggaagaaagaaaaatagtcttgtgtaagaatggatggagagttaaaggaaaattgaggccaaagagtgcaacctcccaaagggagaaggaagagaactagcctttactgagcatgaggtctcagtattaattttttaattgacttgatatttagcaaccatgctgaattctcttaattctaataatctattgatattatcttgccaaagaagtaacagttttctcacctctcttctaacctttgtatcttttatttttcttatcttgtgactgagccctataatactacgttgcacagcaatgatgatagtggacatccttgtcttgtataaggctgtaaaaggaaagcttttgtagtttcttcgttaaacatcacgcttactgcaccatgtttatttgtcaagttaaggagtgtctcctttatccccaactttctgattttttaaaagtcagatataagtgttataccttatcaaatgcttttgagcatgtgagatcaactttgatttctctcctttgagaccattaatgtagtgaactgcagtgttagcttttctcacatttaaccatccaatattcctgggataaatcttgcttgattacaatctattctttttaaaatactctccaggaatgagttggtgaatattttattgaagtttataatctatagtcataggtgaaaaatgggcccatacattattttcttgtactacctttgtttgttggaagccaaggtgtattagtctcataaggtgatttgggagcctttccctctttttctaatgtcagaaaaaagtatatgagatagggattatcttttcctgaaagtttggtcaaatgttccataaaactgtctggacctggattaccattattgaactatattttctgggccaaaattgtgccagaattttggcagagatttgtcctttttgcttaggttttcaaaatcataggcatagagctatttataatcctcttttatttgtttaaccttttttgtgtaagtctgttttcattctaaattttattttcatcatcatcttgatcagacttgctagaagtttgtctgtattattgattttattcaaaaaataagtttttgcttttaatcgttttggttgtattttcatcctttgttctgccctttatctccttccttccttctttactttggatttactctgtttaatacttgctaagtgtgtttcagtgtttgcttttcgataaatgtatttaaagcaaccggtttcttagtataattttactctgttacatttttgatactcagtgctttgtcattcatctctaagtatgtcataattttctctataatgttcatgatttaaataacyaaaggttattttacagtataattgtttgtttctagtccatccagtctgattagacgtaggattagaggaaatgtttttaagcatatgtttcaggattctaatcttttgcattataataaacatatcctgatggactgaaatttgattagtcttcctttgaagcacaatctatttttgtaaatgttctacgtgtcttggaaaagaatgtgtattcactgttgggtaaaatatttctatatgtatttgagttttttgcattattcaagtcttatatctttgcttagctactgatttctgaaaagggtgtgttagttgttgatttatctgtttctcactgtagtttgccaatttttacttttttaatatttctaagctgtatactcaggagtccatatattcatgatcattgtgttttatcaatcagttattctttttatcaggatgcttcgatgctttctttttttctctataaaaactgcattaaaagctaagaggctttttcccatttcatatgtgcctggttttttttgttttgttttgtttttttgagacaaggtcttgctctgtcgctcaggctagagcacaatggtgcaatctcaactcactgcagcctctgcctccgcagttcaagcagtcctcccacctcagcctcccaagtagctgggactacaggcacatgtcaccgtgccttggctaatttttgttttttttgtagagacaggatcttcctatattgcccaggctggtctcaaactcctggcctcaagcgatcggtccacctttggcctcccaaagtgctgggattacaggcatgagccaccgtgcttggccgggattttttttttaatctagtgtctcttggttggtgagcctgtttgtgtttcttgtgatgactattgtagttttaccatcttctttcatgtttttagttcattcttttcctagtcctttcttgccttcctttagaagtgtaaatttccttctgtatatgtgaaaatgcacattttatttttattcttctgagttatttcttagtttattttttctgtgactatcttacttatcagtatctgtatctttcctcccaaagccacactgtcctcatctcccctatctcccctcatctcttcctttgcacatcataccctatgatgaccatggtgaaaccatctagaattttagttctgggtcgtttagaacatacataatacggtggtgaatatattccttactgcaacaacagtgatcttcattgagatatattgtaagtttttcaaccttactttccataaacaggatctcataacatcctgctagattgacttttcttcttccaggaatgcttgaggaatgggaatctagagggtcttgaagtggtaagcctgtgaggccttgaattattaagaatgtctttaatttttttctcacatttaaatgatagcttggatggattaaaaatcaaaggcaaaaaacttcgataggataaagctttggaaatatgacttcattttccacttgtatcgcttgttgtcattaagaaccctgaagccatttagatttgcgttccattatatgggatctgcttttagaattttcactttaatatttgtaagttttaaaattatttctcttcaatgtgtgtttttcctgtgaatgtagtatctgtgagatcttccaatttcctttaacttaaataaattcttagtcatattttaaattacttactcctggttgattttcttttccttttaaggaatttctagtattatagatactgacacttctgtgtattgcatgtcttttttcttgtgtatttcccacctacttcatgaagcctcctggaaaaaatcttccagcccctgaattcattctcagccgtattcatgctgctcctcagcctatctattgaactcttcatttccacaactatacttttgttcacagtatttctaggtgtttctctttatacctgctcattttaattgccctctgtgtatttttgggacattttaatacatatattcctactctctggttcactaattctccctgtggggatagattttagctcaccatgtttagtagatgctgccttccttggtgttcttgtttgattccctgtgagctcttcttgcttgaccctcagggaccctcctctcataccactgcttcaggcattgtttctcctgagtgtctccctgacttgtcaccactttgcccttgtggtgtgagggaacaagcaaggagtggcttggtgttctgtgaaccttcatcccactgttctggcatttccttcctcatgcaggggggcggggggtattgaaccttccacaatctgccaactgtaatacggaggaaagaaaaaaggacaaagggtttttacccagcctctcctccacccgcagtagaggcgattgcctgccattttgtcctcattgcaagacccctagtttccccaggaatttatcccagttttgatttagtttctcaaatttgtcagctgcccttgcttctgagcgtctctgtcctctaagtttagattctgggagtgtggcagagcatattggctcatgcctgtaatcccaacaccttgggaggccaaggtgggaggattgcttgagctcaggagtgttcaagaccagcttggacaatatagtgggaccccgtctctacaaaaaatcaagaaagaagctgggcgtggtggcacatacctgtggtcccagctactcaggatgctgaggtgggaggatcgcttgagttagggaggttgaggctgcagtgagctgtgactgcaccagtgtgctccagcctgggcaacaaagtgagaccctgtctcaaaataaataaataaaaataaaaatagattctgggagcatgccagcagttcatgcccatgtgtggtcttgtcaggagttataatagacatcttattttgaaataatattattttcttctatttctgattagaaaattttaatttgtatttattgtaataattttggaaaatacaaaaatctcagagaaaagataaaaactatatgaatcctgacattaagagctatttgcagcctgcttttctactctttctgatgaactgtatagtgaactttacttaggtcatcatggattctaccacatgacatatgatatctgtttggtggtctgtcgcgtggatataccatgaaatgtttaactcttccactgttggacatttaaatggcttaaaacttttttccttaaaaaaacttatttcaaacagttgtacagtctgcccagaaaaagggcccaggacacagtttaaaaatggtaatactaatagaacaaaacaagcagcacctgttggaaagatcccataaacgtattggcaataactagcaagcacttttgattattgaagccgcagcctttctggccctggctaatcaaatgaatggatttgcttgtgacctgcgaacctgtatttgaatactacattttgtattatgttggtttgaaaagtcaacttaatagtcatattatttcaatagcttcttggctactctgtctgacttcaggggtagacttgagtttgagatgtgaaattccccagcatagtatagcaaaagctacatatacctagacgttagggcttggttttattatttacttactttatttatttatttttgagacagtctcactctgttgcccaggttggagtgcagtggcatgatcatgactcactgcaacctcaaactctatgggctcagatgatcctcccacctcagcctcccaaatagctgggactacagtgcaccagcacatctggctaatttttttttttttttttttgtagaaacggggttttaccatgttgcccagggtggtcttgaactcctgggctcaagtgattcacccatctcagcctcccaaagtggtgggattacaggcatgagctaggcctggttagttttagaaacttatctataatagaatgtgacactgatgtccttaccaggctaagatttgaagtatggaaaattgtagggcgtggtagaatattttgttgttactcttggcagtatgttttcatttgtgtttaggtttagtttgtttattgttttgatcttttctcatctttctgaccacaaaagaaacctggaaagtatccatcctacgcctttagctcttacctgaaggccttgaagactctccagcaccaacaccttggtctctgttctggaatgaatttggaaaaccaagcacagccagtcaaatgggctgtttccttcccatataacttttggccttgaagctaagacacgtggttctctggtttctaaggttccttgggtctatgagggagaaggagaggagagattatttgaaagcaaggattccacagggggatgtctgccttcgagcagtggttcttaacattttgtgggtcattaaccaaaagcctgatagtaagaatctgagagaactactccaaaaaaagtaataaaacatttatgcacattgacacagacttcgctttttatttctggggaccctgagtttatggagtcctcagaagcccattgttatttatcaggttaagaatctctggcttagaattttggaaataatttgtttaagaaatgaaataaaagaaaatgaattggcattttccacccagtcattccctgagcttatgatgttttattcttcactgtgggaattccttcttatccatgggattggaaggcggtgattggcctatgagaatgtctcctagagctggcacaattcccgcacctgtacttcatgatccttttccctttgaaggtcaggggaatgctcctattggctcattttcttgaggtcttaaagactctggcactggttgggcctggtggctcccgcctgtaatcccagcactttgggaggtcgaggcaggaggattgcttgagcccaggagtttgagaccaggctgggcaacatggtaaaactccatctctacaaaaaatacaaaaattagctggccatggtggcacacacctgtggtcccagctacttgggaagctgaggtgggagtcttactttagcccaaggaggttgaggctgcagtgagctgagatcacgccattgcactccagtctgagcaacagggcaagattctgtctcaaaaataaataaataagtaaataaagactggcagtaatgtagtttcttaaatctaaagaaaatatcttaaatttggatttcttgtatcaaggtttttgttttttgggttttttttgttttttttttgtttgtttgttttgagacagagtcttactctgtcactcaggctggagggcaagggcatgatctcagttcactgcagcttctgcctcctgggcttaagagttcctcccatctcagcctcctgagtagctagaggtataggcgcacaccaccatgccaggctaatctttttgtattttttgtagagatggggttttgccatgttgctgaggctggtttcaaactcctgggctcaagcgatccacctgccttggcctcccaaagttctgggattataggcgtgagccaccgtgcccagccgaatcaaatttttaagaactaaggcagttgctatgtaggtttgttttgtttttttgtaatgatttcttccccctgaatttccccaaatgttttgctgtttctgcaatactatgctctgatctggaagctctacagtaaaagttaaacctaatatatttgggggctagggtggcaggtaggctgagctactaatagtccatggatcagttggaggttggttccatgaagcaaggagggggagactggacaatttactggccctccacctgtttctttccacgcttgctatcttgtttgtcttatctggctgtacagcttctctctgcagaatatttccttctctcagaagtaacgtataccatttatgtgcatttgtttagttgttcattcattacctcacatagttagtgatatttcctaaacccctactttggggaacagagttaactaggctataggagaaacatgaaatttacagatgttataatagggggagaagatgtgtacatgcagaacttttctccagggtgcaggtgatccgtcaagtggatctgctgcttccatctcctcacctgccatgacattataatttgtttctcctgtctggactgctatatgggccttaaaaatgttctctgtctgtttgctctcacccacctcctttggtgaaatctcctgtaattgctgttaccagaatgtcatttgctgcttcagactgttggctcctcactgcctgctctgtcagtgggcatgatcctgacctttttggccctttaccaattgcactctctttactcaactcctttctccggcccaaagtacactctccatcctggccaagtacattcatttggcatatgcatgctgccttgccctgcccatgccctcccgcctcctgcagtctgcatgcttcccctcaccttcctgactcccactgcactctcccagtgtgaaattctgatgtttcctaccagaccatgttctttttatatattcatctgttcagcaaatgtttgtttagtaaatgctgtatgccaggcattttgctaggcaacagggaaacaaagttcttgccttcacggagcttcagagtcctgtgggggacacagacaagtaaatagtactttcagtttggagtgatcagtgctgagatagaaagtattagatgccccagggcacatattaaagggacaacttggtataggggaagggagagatgtccgggagatgttccaaaggcagtgagtgacccaggctgttgaaattgagtattaagttccttagccaaggagtgaaagaaaactggagcaaaacatcatctgccaaaaagccatgtattactgacctcagcacaccaatgtggctgagtgaggcccgagttgggtgttgctggctaggggtccccggcttgcaaagtgaccaagaagaagaatcacttgtttgtgactttcaactttgtaaggtattttaagttggtacttggacaagatggctttttctttgtgtgtgtatttgaacaaaatgttcccgtttgcagcactcattgagtggtcattgacaccagtaatctatacatttgccctttagtggtgaaatggagttgtttgaggtgtcagcttggtttggagtgtcactaaaagccttttaagcctgcttcatcacagtagccctgggaatcaacgagaaatgtctctgagttaagagctaaaattacaaacatccagtctgacctgatcatgaggtatcttacaatggttccaactcggtgacattcgacattcgtactgtagcactgcctctgtttgtttgttagtggtcatttaacattcaaaggaagaagatgctaatggccaaggttcagagataatgtttctagagtttgctctgtgttatatgttttgttttgtttgagacggagtttcgctcttgttgcccaggctggagtgcaatggtgtgatcttggctcactgcaacctccgcctcccgggttcaaacaattctcctgcttcagcctcccgagtaggtgggattacaggtgcccgccaccacgcctagctaattatttgtatttttagtagagactgggtttcgctatgttggccaggctggtctcgaacgcctgacctcgtgatccacccgccttggcctcacaaagtgctgggattacaggtgtgagccactgagcctgacctgtgttatatatttttatctggatcagtaggtcttttgttttatttgagagggagagagtcttgcactgccacccaggctaaagcgcagtggtgcaaacatagctcactgcagcctcaaatgtcagagttcaagtgtgaatcagtagttcttcatctttttggggtcatggccccatttcaccacccagttaaatttatggaaaagtatacacagaggctggtcgtggtggctcacgactgtaatcccagcactttgggagatcaaggcaggcagatcgcttgaggtcaggagtacaagaccagcctggccaacatggtgaaaagttttctctactaaaaatacaaaagttagccgggcttggtgatgagcacctgtaatcccagctactcaggaggctgaggcaggagaattccttgaacccaggaggtggaggttgcagtgagccgagatggcaccactgcactccagcctgggcaacagagctgtctcaaagaaaaaaaagaaaaaagaaaagtttacacaggcacacacagaattgtatataccattttagaaggttcctggatcctctaaagtccctcatctccctttagccctcgggatcattattggttcattctaacaaggtccatataaaatgattgccattttaagctaactgtgctatccattgatgccttggttcctttctcaccattctggtttccttgcagttgataactcgcacacgagaaacagtctgaggccccttacacatctgctgctaagaatcactgtcctgtacttcccttcctctcttctctggaaataatggatgcatatgtatttgttggagaagtacaaatagatgagttctgcccaagcagagaaaaagctcttacatatttgtgtgaatatacttgtgcaaatagaaaatagaagctattcacatatagctgtcttcaccactggcctttttctgtttccatattaaatgtttttcaggttataaagccgcttataacgtaagatcaaaattgtgttatttaaaaaataatgaagctcatgtatccatgcttatatataatagaaggtgaaaggaaaatactgaaggcacagctactcggagaccacaatgcagatgttgagactttgctattatttggaattttatttactgcgaaattgggtgggagagaaaaaagaggagtaagccttcttagtaaactgtgttgctggcttttttcttctgacgatccactgggtattttcaatggagatgaggaaaggatgtgtttcagatggaaacctttatgaactctcctgtgagctctccagcttctcaatccatgggccctcattttggtttcttattttaatcctaatttatttagaaagggtaatattttttgaaatgctttgaaaacaatcaaaattacattcaagctgtggtgagtaaaaataaaaacacagcatcctaagaatcacatagtagtgtgccctgggagttcctagttcacaagaagatcatggatgttaacctgagagacttactgaagtcatctaggggagatgggtcaagaaatagccccattttataggaaatccagctcagagctgtgactgaggtcatgaggctggtcatggaattgggagtagatttgaccttctagttcccaatccagggttcttcatggcttctatgccactgggacttagtgtaaatctccttacctctttgagtcctaaattccatattccgatagtgtatgcttatttcctgtgcttcagagttattctgagaatcaaattctataacgtatgcttctcaaagtgtgattccccaggccggcaatggcagcatctcctgggaagatgtgaaaatgcagattctcaggccccaccccaacctgaatctgaaactctgggaggggcccaacaatccgtgttttagcacaccgtccaggggattctgactcatgaagcttgagagccactgatgacacgtgagatagcattttgaaaagaagaaagcattacagaaatacaagataccttgttttaatggaggtaaaatgtatatatggtgaaacacaaagatcttaaatgtgtaatactgaattttgatataatcagtgccccagtgaagatacagaacttgttcatcccttataaagctccctcttgcctcctcccatcagtccccacccaacttaggcagccagtggttaaggacagactattccttagagaacataagagaactcgatgatgggttaaacgtagaaagagcaatgtctgtgttctcgtattctttcactatttgtaggtaatgttccttttaaaattactaaccatatttctgtgttctttttcagcccatggaccaagcttctctcaaaaacagcgatgttcttgttctgacagggcttacccagatccccactgcaaacccagatggaatggtgggagagttctgcagcaacctaggtgtgcaaccgtctctcatcttacgttggatgatctatcttgcatttattttacaataataaatataatattttacaataatgggggaaggagtgcttacagggtagcagttgtcaaaggagggaggcagtatatctttgcaaataatagcacagaaaagagtgttacactttgaactcacagcagcgatacagtgaacagatagatatgtatgaatgtttgtgtgtttgtttttgagacagagtcttctctgtcacccaggcttgagtgcagtggcataatcttgggttactgcaacctctgtctcctgggttcaagcagttctcctgactcaatctcctgagtagctgggactacaggcgtgtgccaacacacccggctaatttctgtattttttgtagagacatggtttcaccatgttggccaggctggtctggaactcctgacctcaggcaatccgcccgctttggcctcccaaaatgctgggatttccggcatgagccacagtgcccggccaaacaggtatattttttccccactaatatttggttggttttattttttcttcttttgaggaaaggctaaattaagagaggtatggggcattttctacctggaagaaatttattttccttcggatataactgtcactaaatctggaagttctgcttctcatttagacaaataggttggttactgtcttagttagtttgggctgccgtaacaaaatactgcagacattaacttctcacaattctggagactgggaagtctgagattagcgtgccagcatggtcgtttcttgatgcagatgattgccatcttgcagtgtcctcatgtggagaagaggggaagctctggtgtctcttcctcttctttttttttttttttttttttttttgagacggagtcttgctctgttgcccaggctagagtgcagtggcacgatcttggctcactgcaacctccgcctcccaggttcaagcgattctcctgcttcagcctcccgagtagctgggactacaggtgtgcgccactgtgcccggctaatttttgtatttttagtagagacaaggtttcactatgttggcccatctggtctcgaactcctgacctcatgatccgtccgcctcggcctcccaaagtgctgggattacaggtgtgagccaccatgcctggcctctcttcctcttcttatgagggcatgaatcccatcatggggcctgcaccctcgacctcatctaaacctaatcacttcccaaagtccctgcctctctgtaccatcacagtgggggttaggccaacatgagaatcttgtgggggacacacacattcagtccgtaacagctaccaaagaggtattaatgagctcagaccttcagctccagcaactttaagtgatattacttctgctctaggaagaagaagtggtcatcttatatttacacggaaggcactgttcttagaaattaaacttagccatgctaataaacatagtctgtttttgttctttgatactaatgcaaaggtaatttatttgtaccttagaaaaataattggactaatctcaaatagagtcttggtttgtatgtttgtttataatctagaatcacagactcaaagaactttaggcttgaaaggaaccttacatttaattcagtctcccaaagtggggtccactaaccgcattcccttaagaccaatgggattacttattaaaaatgcaaatttgggggccctaccttagacctagtaagtcagaatctctggggaaaggagacttccagaagaaaagttgcattttcaacatattctctggcattttccacgcaaactaaagcttgaaaattactgatctaattcattcttttcatgtaactgatgcagaaactgaggccaaggaaggttgtagtggctttcctgtggtcctgtgggttgggacaaaggtaggatttgagacaggctcttgagctatgaccagcgatgttgattttctccactgtatcctactctagtaccatactctagtaatagcaagtccaccagccctcaagttatagcatctaggtgagcctaagtacttaaagtataggggattttcctgcagacaaatgttaatgaaagaaaatactactaactcctgcagacaaacgttagtcaaacagaaaaactcggcctattttcttataggtcattcagccatggtcagagactgaacagagacaaatccagcaaatttttgagcaggatctaaaacgggaaggagcttggaggctctgtcctgaagctcagctgccattggtaaaaacccaaacccgtagtcacatgctctattcccagggacctagattagacaatgatgagaaaatcattatcagcctatagcatcccctgctttgatgtgttcttcaaaagaagcagcttattagacatgtaagtaaatcataaaaacagaagtaggaaaacaagtgcaaatcttattttacaagtttatctttataacactgcccttttgatatgatgttttttctcctctggcatccacttttctagctctgacagtccggaatggaggaaacgtgttggttccctgctacccttctggagtgatctatgacctcctggagtgcctatatcagtacatcgactcagccgggctttccagcgtccccctctacttcatctcccctgtggccaacagttcactggagttttcccagatctttgctgagtggtatgtccgtggtttttttttttgtgtgtgaattttatttgattcaggacattcaagcagtaagaataaaaataatcctgttttttctcacattactgtggaaatttcattttgttgtttttctgtctgtgataagattgcattattaaaagccaaatctgttgcattgctaagtttagaataatagttgtcaaagagggaagaatgcaaggcagagacttaccttagcccagcactttcaaaactggtaacaaaaatcttatatacttatcacatgtcaccctctgcctgttactaggtgaaatgacattctaaaagttaaaaaaattttcaagcccaatctcatgttgtctaaaatgtatagtgccaaatctgagaagaaaaactagatttttaaaaattgcaatagtatgatatttgacaaaattttattacatcagaaaattgatcaaatcctagagttggcaaaatatgaaacaatatgaaattagtgaacctttttagagttatttaggtgcatgtttgaatgtaactcacctgaccaaaaataaagggagaagaggaaaataacttttacaatatccccagtggtgccttagaatggtgcttcccaaacgttccgggactgtgacacaggcagtctaggctgcatttaatcccttttagtcatgaggtagccgatagacacagcatgtactgagtttctaattaaaaaggaatttgtacatcatcttctcatgatatattcagttacgctgcccccaacccttgcttttgtaaagtacttttttcattcccttctgtggtcgtttttttcccccctgtgtttagactcatacaggcgtctctatcccatgtacaaattattcttctttgtcactttttttttttttttgagacggagtcttgctctgttgcccaggctggagtacagtggcacaatctccgctcactgcaacctccgcctcctgggttcaagcaaatctcctgcctcagcctccgaagaagctgggattacaggcacccgccaccatgcccggctaatttttgtattcttagtagagacagggtttcaccatgctggtcagctggtctcgaactcctgacctcaggtgatccacccgcctcggcctcccaaagtgctgggattacaggcatgagccactgcgcccacccttaaataacattagtacattattattaactctgaatctttattctgattgcaccagtttttccacaaattttttttttttgtttttgtttgggatccaatccagggtaacacattgcatttaggcctttgatttttttgtttttttgcaagaagttttttttagttttttatactgatagttttagtctcttttgcagtttcttctgttgatactatgtttagaaaattcttgcctctataggtgtcacatggctaaacatactttctttcagttttattgtagcttctttctttctttttttacatcaccccttaactattttatctggaatttgttttagtatatagtatgaagagaagcactaatttcattttttcccaagtagtcaagtacttacctgtccaagtactatttattgagtaatgttaactttttcagctgatttgtattaatgccatatgccagactttcatatgcaccaggttttgtttctagactatcctgattgagtgatccattcattctttggccaacatgatgctaatatattttaataactgcagcctcacttataattgtactctgtggtaaagtacatttctccattatttttcttagaattcttggagctatttttgcttacttatttttgtggaagaattgtggaatcactgtatcagttttcagaatatctttttgagtccacaaaacctataaattacagtttgcagtagttttcccatgctgagacatgggatgtgtgtctgtcttttaagcttttcaaatattcctcccgtagactcttaaactcagtgatcatattattcttgtttccatcgatagttctatttgcttaaatccataaacctttaagtgccaaagcactgaggatacaaagaggtccctgaccttgaggaatctgtaccatgaaggaagaggcagctgtgtaaacctcttaccactcggaagtaatctgatggaaatatatacacacatacccacacacacacctacgtatatctgtatggtattcagagaaggggtgggtggtgaccccatttggggggttaagaaaggcattctggaaggaggtgctcctgaagaataaccaagaatcagccagacagaaacactatttaaggatgagttgggtggtctgccggcggtgatgtgtgggtggagaggataacacaagccaagacatagatgggaggttagaatggtttggtttgttcagagaactatccatagttctttattgttacagtatgaagttcagggtggggagtggcagggtatgaggctagagggatcctgtccatgggggggattcattggaggattctaagcaggaaatgaacatgattatatgtgcattttatatagagccttctgcatttatgtgaagtttgttgggaggtggtgggagggggtgcaactgaagtacaagacaagagtctttgcagaagtcgagggactgaagactccagtctctaccatcctggaggaaagcaaggcaggaacccatatgagaggtgattaggaaatacaaggggcaggacttactggttacttgatacagaaaaggtagcaatcaagattgacaccacaatttctagtgtagtagatcgtgttgaccccaaacaaaataggttctacaaaggaagggtaggttcatacagcaagtgtggttagcttagtttggttttgtccctgagggcattgacggtgcctgaggcaggggatgtgcaggtgaaacttgtccaatccaaagatctgagaagcccaggctggagtcataggttggggtgtcctcagcgttgaggtagttgagtggctgggattgccacaagaatgaatgggattgtctggggagaggatttgaggttagaagaacaggcagtggggaaaggatggacttaagtaatgcctgcatttttggggtcattagagaacaaatatttaggaaaagtgtgaagacaaatagttaaagaagtagaagaggccgatcagggtggctcacacctgtaatcccagcactttaggaggccaaggcgggaggattgcttgaggccaggagttcgagatcagcctgagcaacatagcaagacctcatttccacaaaagattaaaatattagcagggtatggtggtgcatgtccatagttccagctactcgggaggctgaggcaagaggatttcttgagcctgggggatttctctgtgtttctgtttcactgtgctgttctctttcatgcagccttgctgtaaggcaccctttttccctaaataaggaactcagttaccaaaatggagagctgctagctccagacttgcattaacttagcaagtcccagccccccatgccaggaccaccacaagcctgtgctgagggtttggcttcctctcctctttggtgttctgaacgggtgcttcacagcctggctgctctgtgctcagcctcaggcccggcctgctgttccctatcactctggttccctggctctgtgcttcccgttctcaggggttctgctctggcttctacatggtcctgctttgatgcctgcagaagcccagccccttgctgtccagtgtctgcccttgctccgagctaaggggcttggttgtttgggttggttttgtttttgcaggggatggagatgggagggaatagctcttgaaagacctctctgatcttttggagtttggagtgttggggttcggagtgttggttggttggtttttgagacaggctctcactctgtcgcccaggctggagtgcagtagcacaatcacggctcactgcagcctcaacctcctggtctcaagcgatcctcccacctcagcctcctgagcacctgggactacaggtgtcaccatcatgcccagctaatttttgtacagacaaggttgcatctcgtctgaacccatgaactcctgggttcaagtgatctgcccgccttggccttccagagtggtgggattacagtcctgagccacagtgcctggctctgatccttttttgaacaagcagtggaagagtgtgcggtacctgaggtctggccatcagggagcaggagggtctgtcacattcccaattagagataatcctagaagcgccatttattcttcattcttcctgataatctggtatacacagatctccttttgaactctaacagctacccccagaagaagcaaactctaatcaggtccttcagcctctgtcttagaaagggggtgggtccctgtctgctgtgcctgcatgaggattctagagcagagtatggaggatctgttagcagaactggcctaagcattatgtaggtgggcttcacaatctctaatcatattgtaatctcttctgtatccctaatctctgcctttaatgcatgtaggataatgtcctttggaacaatcaaaataagtttagaaccaagctcttatatttgtctccctgagctagaaataaagacagaactagtgtctatttagataatataaggtaaccctccaaaagcatcttgctcttccatatttatatcttccaagtagggtataaagtgatgtttttttaaaccaaacttaaacgaaactaagggtaggaaaaattagatacaatgtattaatacaaaatccaagccctgaagtcctgagctcctcccctcaaagtagtgactatttttttaaatgtcaaacctgcacaacacccacatatattgatttatcaactgtgaactttttgccacatttgctttatccagacatctcagtattgtaaagtcataactgactaggaaaaagcaaatgtaaattaccaaaaacattcacattgtctctagcctgtgatcctttgttcttctctagttggagttaccaatgctgctgttaaaaagagtgtgagggccaggcacagtggctcacgcctgtagtctcagcactttgggaggccgaggcgggtggatcacctgaggtcagcagtttgagaccagcctggccaacatggtgaaaccccgtctctactaaaaatacaaaaattcgccgagtgtggtggcaggtgcctgtaatcccagctacttgggaggctttggcaggagaaccactggaacccaggaggtggaggttgcagtgagccgagatcgcgccattgcactccagctgggcaacaagagcgaaactctgtctccaaaaaaaaagtgcatggacaaaaacagaagccatgtctcaaggtgtagatcactttctttgtgaaattgaccacaactaaatgcaatatgataccacggattggatcctggaacagaaaagggacatgactggaaaaactagtgaaatctgaatgaagtctggagtttagttgattgtcattggcctgatgttaatttcttagttgacgactgtgccagtcatatcagatgttaactctggggacatagggtgaagaggccatggaaactctgtactgtctttgcagcttttctttaaatctaaaattattccaaaataacaagtttatattttaagaaaaaatgtattgagaaattctaaagtttaaaaacatacaagatacatctcttctctgtaggcactggatttcattcacagtgaaattcactggcgggaaatttttaaataaacttcagtatttaatatttgcactgctgccactaggtggcaacagatgccaccgtatgctcttcctcacatgctgatgtgtttttcctctttaataggctttgtcacaacaaacagagtaaggtgtatcttccagaaccaccttttcctcatgcagaggtaagaaaacaaaatcactgggacatgggaaggaagcaatgtggataacctgatgcagatgcagacagcaggtcattagatgaaatagattgctgtgtaaacctgtagacccctttgcctcccaagtcagacacagggaagtattttaactcaagcttcacttgctttcctcctattaacactttctattgcgcacgtggagcagcccttctccaaaatgttgtggaccgcagaattgtttcagacttgggattcgggaatatacttactggttgagcatcccaaatttgaaagtctgaaatcaaaatgctccaatgagcatttcctttgagcatcatgttggtgcccaaaaagttcagatactggaacattttggattagggatgctcagcctgtaccatgttcatgcaattcatagcctgcttctgttctactgactgcatgatgaattgtatttcgatacatattactacctttttaaattgggtttatgtattgtcagagtgttctttccagttatgtcagtcatatatgtacatttttagtgacgaaaataacatttcagttcaacaaataaaaggcttcttcctccctcacagaacaaatgggtgttttctatatagctgaatacctagctttgttgtcaggttcttttcacccaagggtatattatgaacgtttttctgcgtctcatgttattattgctctactacaatgaagctaacagacaatagttactcctcatttttggttatattttcactcaaagattctctaaattggtatcaccaccttagaaaactgacagtattggctgggctcggtggctcacgcctgtaatcccagcactttgggaggccaaggcgggtggatcacaaggtcaggagatcgagaccatcctggctaacacagtgaaaccccgtctctactacaaatacaaaaaattagccaggcgtggtggcgggtgcctgtagtcacaactgctcgggaggctgaagcaggagaatggcgtgaacctgggaggcggagcttgcagtgagcccagatcgcgccactgcactccagcctgggtcacagagtgagactccgtctcaaaaaaagaaaaaaagaaaactgacagtatctgctaaagctgaacaatgtactctatgcctccgcagttttgttcctaaagtatacattgaacagaaatgcatagagatgttaccaaaagacacacacacaaatctagaatttggtcaggtgcggtggctcacacctataatcccaacactttgggaggctgaagtgggaggatcactggaggccaggaatttgagaccaaccttgacatcatggcaaaaccctgtctctacaaaaaaatacaaaaaattagcccggtgtggtggcacatgcctgtagttctagctaccctagaggctggggtgggaggatcacctgaagctgagggagttcgaggctgctgcagtgaactgcaatcgtgctacttactgcacaccagtctgggtgacagagcaagaccctgtctcaaaaaaaaaaaaaaatctaaaatttttggtaatagtactgaaatatactcaaattcccatcaacaatagcatggattttgtggtatactcacacggtcccttacatcactgtgaacaaataagctccaattatatgcagtgtagataaactgcacaaacataatgtgagtgaaagatccagatataaaagagtagatatggtatgattttatttacataaaagttcaaaaacacaataaactgatctgtggtattagatgccagtgtggtagtgatcctggaggggaggggacagtagtgacaggaaggggacaaagagggatttctgaggagctagtaatgctttatttcttgatgtacatgtgttcaccttgtaaaaaatccatcaaggtgtagagagttagatataaggaaagagtgaaggctggaatgaatcctgtgctgttggatagaattgatggtattggtgtgaactcctattttcaatatatgtagatacagaaagaaatccacttgtgcatgtgtgtgtatgtgtgtgtctgtgcacatacgtatcttccagctctggccacacagagggcctgggagcagtgacatgccactaactgaggaacacatttagctcccacatgttggtttctagataccattctccactaaaaggaaccaggcctctttggaaaatacaagatgaggctgtaagatcttgctgtatgctcagagaaagatggggacatgtcagaagccacatctgagatcactggaacatcaaaataaataatgctagtaatgaatataatccactgaataacagaaactcctgcatccatagtgaggtaactgagtacataggcaagaggggaaagttcttccaacagtaaactcataattaacataggaaagaaccttagaattagaaaatcaccatttggcagccaccgcagtaataatttattcctgcaagaaacaccagtgggtgctaaaaccagtgggtgaaaatgttatgaagaactagatcatttatagtcccaaaaagtatgtccccacaaaagtcatgtttattacaaagacagaaatagtaactggagtttggacaaacttgacatatgcaatcaacgttaacatcaccagtaattggactaactgacattgcgtggctcttaacacaaattattgagaaagcagcatgatttctgtgatcctgctgctaaaaatgcttcacctgaatctagtgagcattcagacccaagtcgaggatgctcaacaaaataactgacctgtaccctttgagaatgtcagagacctagaggacaagggaagactgaggaactgccgagagaatgaagagatgtgacagatagatgtactccatggccatgggctggatctggaaatggaagaagaaagatctagtttgtttgctattaggagcattgataacagttggtaaagtctgaatcgggtgtgtagatgagagggggcagtgttgtgtcactgttcattccctgcttttgatggttgtactgttataatacatccatgttaactgcgattatctccccacactcatttctttgattgtcatatttataacccctcctcaactaaggcaggtagactgtttttacttacagcatgtcagtgcagatagatatgtttagggatttagttgttttgttttatagttaactaacacgtatttcaacaaatgtcctgctaattactttaaatgtaattgctgttttcatactgtaaaggataggtcttttatgaaccaggatgccaagtagaaggttttgaagaagttattttttggtccctgtagtctaaatagtattttggcagccagggtttttgcaagctgtgtcaatgccatagtgaaacacaggctagaaatattataaaaatgtcagaaaattaagtgtggcaaaacatcttgtggtggactttgctcttgaatgtctgttttgcttcctttgcagtcagccttgctgtagagcttgttttctaggagtgtgatcacattctcactcacacacctgtcacaaatgacctggtgccatttagagttaggaatgtgagtagactgtggtcgtaccatgagggttcctcaggtgcacttgtcgttgttagggcatgagggagtcaacccttggtaatgttaccaatgcccatgagaaacggtggttccacccttagtactggtaacaaattactgttcagaattcctgccccacagcttcatttccactggtcaaatgcagtaagttggctagaaaggtagatccaattggcaaaaaacgatgaatttatcttagtttctgtgcattgatcagtagagctacaggaactatagataatgcttaaaagtgacttacgtgtgcagagacctgctgctattcttagaatcacattcatcatcttgacatcttaggatacaatagaccctttttgacagccactcacccatttaactgagacaactaatgattttggccatatagtttataaaaagaatgtcagttcaacttgcagactacctggaaggaacgtgggaattcgatgtttgctccggctttactattcatattccatccaagcatgcgacagctgatgaagatctccaggatagtgttagtgtcttcctaatacaaccaggtctcttcaattaaagatgaggtcttcaaggtgaagagagtttggcttctgtttggggtatgtcctattctggccacatccccactcttagggtgacttcatttgcacttcaaggtgttgcccagggccctctcatgcacaacatgtggcaacaggattgagcctatcacaggccattgctttatccatgaaacagccttccagagcagtgcttcctttggcctggttgatatttagggtctgtgaagtctgggtgtctagcctctggatgctggggtggggcaaggaggcctgggcagcaggcacagtgtctgagacgttacaagatgccatctagtcataactgtctttgctattgccttgaatgggcctgacactgggagatgattgtcaagtgttgtgctgcaggggagactcttggttcaacacgtacacttgaaagaaagctttgaggctgcggggcacctgcttctttttttttttttttgagacggagtctcactgtcgcccaggctggagtgcagtggcgccatctcggctcactgcaagctccgcctcctgggttcatgccattctcctgcctcagcctcccgagtaacggactacaggtgtccgccaccaggcccagctaattttttgtatttttagtagagacggggtttcaccatgttagccaggatggtctccatctcctgaccttgtgatctgcccacctgagcatcccaaagtgctgggggtttttttgtgtgtgtatgtgttttttttagtgacagggtctcagttacccatgccagaatacagcgttgcaatcatagattactgcaaccttgaactcctgggctctagccacagtatccaacaactttttttattttttgtagagacagggtcttgctttgttgcccagcctggtctcaaacttctgggctcaagcaatcctcttgtctttgtctcccaaagtgctggaattacaggcgtaagccattgtgcctagcccatttcttaatataactgtctgtgttaccaggacatcacatttctaaaagccaatttgatctttgtcgtgcatgtgtgtgtgcgtgtatgtgtgcatgtgtgcacacatgtccacatgctgtacacattcagagaagcttctctagtagcaaacaacagaaatgatccctgaaagtacagtctttggtcttggtccttattcagttgctgcagtagcttaacacagctctagctttgcaggaggaggtcctgtactggcaaacagtgtttctggtgtgacagatgtggttactgtcaccaggacttggtgattcacgagtgttgggaaagtcacttgtacttcaaacaagaagtgataatgagaacttcaggcctggtgtggagtgtcaggcagcttataaaggaagagtccagctaaagcaggccataacaatctgaatatgtttccaggaagtatgtcagtattaccagaaagacttgacttgcccatgtgttccacaaatcacattctgggtaaaaactattttaataagattcacttgtatttttttaaattaataagtgttacttttcacagcagttttaggttcacggcaatcatatgcccctgccccacacacgcagttgcccactgcaccatcccacaccagagaggtgcgtttgctacggctgatgaacccacattgacacgtcactctcgcccaaagcccagagtttacagtaggggttcccttggcgttgtgctttctatggttttgaacaaatgaacagtgacctggatccaccattacatcatcacacagaggagcttcctcactctgcagatcctctgtgctcagcctgttcatttcactctccacgaatccctggtgaccgctgagccttttactatctgtatagttttgccttttccagaacgtcatacagttggaatcataggggccttggcttttcagagtggcgcccttcacttaggaataggttccttcatgtcttttcgtagcttggcagctcatttcttttttagggctgaataatattccattgtctggatgcatcagtttcatccttcacctgctgaaggacacatcttggttgtttccacgttttagcaattaggacattcatgtgcaggtttcttgtggacatgatttttcaaaatatctttcaaagtggctgtatccttttgcattcccaccagcagtgaatgagagtccttgttcttccatatccttgttagcatttggtgctgtgagtgttctggattttggccattttattataacaggtgtatagtggtatctcatcattttaatttgcagtttcctaatgacatacggtgtggagcattttttcgtatgctcatttgccatctctcttctctgatgaggtgtctgttcaggttttttgcccactttttaatagggctgttcatttctttttgctgaggtttcggagttcatagattctgggtcacagtcctctctcaggtgtgacttttgcaggtattttctcccaatccgtggcttgtcttctttgttggtattttagatccagtcccgctcaccctcccgtactttggttcccccttcagcctgggcaggctcacatttctttgtattttttctatattttccagctcattcagaccaataagctgaagcactaccccagcatccacggagacttcagcaacgactttagacagccctgtgtggtgttcaccgggcacccttccctccgcttcggggacgtggtccacttcatggagctctggggaaaatctagtctcaataccgtcatattcacgggtaagtgaaaaaaataaagaaacaaattggttctctccactgaggccatgagtgaatgcacctacaaggtagagacccagggaaggattttgcagtgagacataaatacaaacattattctactgtaggtaccaaagaatgaagaaaccgcagagaaagagtgaagcagtgtgtgccattggacagctgggcatccagcgaggccttcatgcctgtgttttcagatttctccaagacagaatcctgctgagtgcttttgctaggatatcgtaagccatttcaagaagtgcagtgattcagtaacggtcttgttttacctgttaggaattgtttacagaggtagatctttttcttctgattgtggtttactctaactgtggattttcttctggagacaaatccctcaggggaaaaaattcctttgataaggtcaagtagagtgtttacatagataatgactgtatcattttatcagtgtagcgtgcccagccctttgaatgctaggtcttttttgcttatctgtgataggggatatcttggaaattatgcacagacctttttttttttttttttttttttttttttagctcatcagtcatcattagtgttagtgtattttatgtggggcacgagatagttcttcttccagtgtggcccaaagaagccaaaagcttggacacccatgtgttagggtcttcagtcggccttgggttttagaaatcttacaggctatgaagaaaaaagaaaaaaaaaaaaaaaacattgatttgaaatctggcccagcttgcagcaacctcagccaattcaccagcaagcatgactgtccccacagtaaatgggactgtcagtagctacctctgtgggtcactctgggcaccaggcacagaacccggcacatggcggctgttgggaaagcactgtcaccagctcccttcctagctttaggagctgggaatccagttacaccagaagcactggggtgacgcttcagcccttcccccagctttcatttgtgacctagaggccaccaggaacacgcctgtggtcaaaccaagttgggtttattgcctcatttcagcaaggggaacacacaccatgggtaaaagaaaagcaaaaagaccttgcaggactccggctggtgttcggtgatgcgcaggtgttcgcggaggtgaggcgtcaccctgtattgggtggcgtcaggatgcagggtcattctgcgatgggtttcttaactcattcttatctagaacacaggaagaatggagccggcatagcgggaagtttgcttatgctgtggtcaggacagttctgtgttccgtgttcaggatgattacagaggggtcttgtctttggccggatccatcattgtcagacaaggtgttggtgttccaggaagttgcgttcacacagcaggaggacacatggctttgctgtgggtgccaggccggctcttgctgataccaggccaggcagaaagtgccaggagaggccccggtcaccaggactgctttcctcttctcaggcctgctttgggctaaaggtggaggaagttgggccacaagatattgattgacaacacccagaacttcatagctgccaagatttcattaattaggaggttgtccagagaatgtcctatgtagtggggctgaggttggtgtctcctgctcctgctgctgagtggtgactcgacatttgacatgacagtggtgacagcatctacacagcacagtagataacctggcctttagtacaaatgtttcttcagctaaaaggaaatcaggactgtgtgatttcctgtgacaactctgggtaatgggtttgcatttaaactggtttatggggcttccagggcagaagttgtgtctgggagaggttggggccatctttttttattgttttgtgactcctggatacatgaaaagggggtcagtattctcagagaagcacaatccactggaatgggcatttatgtacctggcagctctgccagtttgtcctgacaacagtggagacgtctctgtgtctggtgtgcctaagccagggtccctcgtcgctgggcacagactgtgctgggaatcaaagtgtcacatcagttaggaccgagcgaggtcttttggctcaaggcaggcagctccctcgagttgggggaatgttccctgccaagcaggctgcagcagccctcaggagacaggctgagcagagggcgaggactcttcccggtctgaggggctggggctgctggggagcatcccagtctcagtctacagaccattcacgggcctggaggcggggccgtgcgcttgtcttccgggtgcatctcacacctgggcgttaactcagagctgattctaggttcccgggtctgtaccaggcctctccactgtgaagtcagtttttcccattgtattaaatcagtaccttgtgggggactctttgaaactatatacatattctgttctccctcaaaatggtatctgatatttttagcatttgttgatgattttcatctgaataagtgatgaactgtaatggttgccaaacggtggttttggtttttatttcatcgtttgtttcttggcatttcgttgtaaaaagagctttcttttctcccccacatatgtatttctccctcatttacctcatctgcctctgctgaagcttggagcccacccacagggtccatcccagcctgcccctccttccacggggcccctttgacctccgtcccccacgtgtgcttcctggctccctcctgaccccctgactgtctgtgggccctcagcgccccagttgctgtctggcttggcagctcctgtgtagtctgcattgtaagatttctttcttgtactttccctagaaccagacttctcctacctggaagccctggctccttaccagccgctggccatgaaatgcatctactgccccatcgacacccggctgaacttcatccaggtgtcaaagctgcttaaagaagtgcaggtaatgaaggacactgcttgtgccttcacgtagtcatgtcaccttggtgtggctcatgcttgtgtggggtgaggggagagagatctagctgtgtttgattcttgtcttcagttctcacgcatctgcagaatgctgggacacatgccagcccccctccacactgaaaaggagtggtctttacaccctgaccgcagtttccattctaaagaaatcagatgtggaagggaaagaaaaccatctgtgtccgcttaaaagcaaaccctctcacccctgccaaaaaaaaaaaaagtcattctagaaacatactcactaagctgagacagtttaaatgaaacgcgttactggggccgtgtcgcacgtgtaggctggtaccacaaacagtgctgtcgggtttgggttttgtggcagtttttggtcatttgtttcacttcacattttctgccctggagaaagggaagaagtagctggggtgcagtgtagaccaggaggcgcgcgtagcaggaaggcagggccacggaaccactgtgctggctcagccactgctcgctgggtttctggctcttgagagtcgggagaggaactggaattggcaaggaggacagctgacaccggcgaggaagagctctccctttccactccctggtgttcccaggagtgagatgagggtggaggggcccagcacagcaccttcaacctcaggatgagagaggccctttcacaaaactctaaggcaggggaacaggaaacagagaaagccggagaaccccaggagggccccaagagcggattctggtgattattaatgtgcttgcccaatgaagaaagaatactggcactctctaggtatgatgagagcagacagcaaacgtggggcctgtctacagtgattcgctaccccaatgtatgctcatccacgttagaagcagcagtgaaaggcgtgttgcttttcattattaacttcaaatcccagtccctaaaccagctcttgacgcccctctgtcaggtgctaatcctggaaactggaggccacctggtctccactttaggtgaggaaaacctgggagaagccatcagactgcacctgtggcatgagatgctttgagacaggtcaagaggaggagcaaagggcagtttggaggagaaaagtattagccctaaggaacaagtgcttttggaagctcagcccggtcagcctggtggaaagccgtcttcagcagggaattcagggcttggtccaagctcttaagtagaagcagggacaacacagtgcccctgtgggctgccagcattccttttcatttgggtgatatttgtgcaaagtaaaaattggtttactaatctttttttctcaagataacaaaaagagacattttgtttaaaaaaaaaaaaacaaaaaaaactctgcctctgctccttggttgcacatggtgagcacatgagctgaggagtgcccactgcctaataccagctgacctgcagatccagcggaaactccaaacccacagcgccagcccggcacgaaaagccacagctcttggtaatcagccaagagcttataatagcaggcatgtgggaatgttagagaaagaccgtgccccgaggaagcccagagaccgctgggagcagacacatggaagttaccgtgaaacttatgtaaacagtaagaaagataaattaagctgaggcagtttaggggtttccgagatgtttcttctgccccagtgccttcacgttccctctcctgtctacggttcattgggcttgagaggatgaaagttcaccttggcctggaagtggtgagcctgtaatggcggggagtggatcggggtcaggaatgggccttccacaggggccactgtacttcacaccacctttctcaactgtcccattggttcctcagcccctgcacgtggtgtgtcctgagcagtacactcagccgcccccagcccagtcccacaggatggacctcatgatcgactgccagccccccgccatgtcctatcggcgggctgaggttctcgccctgcccttcaaacgtcggtacgagaagatcgagatcatgccagaggtgagctgttctccttcctagggttaaactagagctttccacagaggctcttggagatcgtgcaggggtggccttcttttggatttatgtcaagtataaatgaaccaggctgcgcgcagtagctcacgcctataatcccagcactttgggcggccaaggtgggcggatcacttgagggcaggagttcgagaccagcctggccaacccagcccagccaatatggcaaaaccccatctctactaaaaatacaaaaaaagtagccaggtgtggtggcacgcatctgtaatcccagctactcgtgaggctgaagcctgagaatcgcttgaaccaggaggtggaggttgcagtgagccgagatcacaccactgcactccagcctgggcaacagagtgagactccaagtatgaatgaacaaagaacatggacccttaaccaagtaaccgggaagaggggggattttcagggccttcttgtttttcaactaataaaataacagctgttagtcaggactgctccttacctagcattcagcagcgtgagccctgggccacatcatgggtcagagccctgggaagtggagatgctgacacccgctctgtccctaaataccataggatggtgacttttctcttccttcctggacctcagttatgagtgagtgtcaagagtttgctgaattcagaggtagatgggggagataacaggaaccaaaaaataaggattgtaaacttggttatttatatcctcttgagcatacttgcaggttttggtctatcaaagtctaagtattttataggtctgtgaactcttagcttcagttttagcagggaaagagccaaagcatgctgtccatgttgaacagctgtggcatgctgcgcttgggccactcctctgagagggagacagagagggacgcggcctctcctgaaagacagcgttgaggatggttggaggctacctctggcttcctttcacctcttgaggcaacttgaatgtgttttcaacagacaggaaaaagaaatataaaaacttattgttaaaaccagtgtgcccaaacttcttttggagtttgaggttcagaaatggcctccagaccttgggttggaggtcttggctcctgaatgtgactcatttccatgagcctggagaggctgctagggaccaccaggtgccatctttatggttgtttaatgtttaatatgtttttatcattttgttatgattttttcactttctctggattgtttttgtctggtattttacaggggctgggattgacggccttggtttagatttcaactctctaagccagcattccttaaaccttttggtctcagacatccttacaaatagaactccaaagaggttttgtttatgtgggttatgtctattgatgtttgctatatgagaaattaaaactaagacattttaaaaatattcacttaataatacaaacctattatatgttaacataactaagggataaagacaaaagcaaaaatcagtcccagtgccagggataaatgttaagattttgatgtatttgccttgtctgttcactgtgtgtgtgcctactggaatcacacctcatacactgtcgtctttttcacctatcagtaagtacattatatcatttaagatatttcagccaggcatggtagctcactcctgtaatcctagcactctgggaggccgaggcgggtggacaatgaggtcaggagttcaagactagcctggccaagatggtgaaaccccatctccactaaaaaaaattagctgggcgtggtgtcacacacctgtaatcccagctacttggaggctgtggcagagaattgcttgaaccgggaggcagaggttgcagtaagccaagatcatgccaccgcactcctacgtggatgacagagcgagactctgtctcaaaaaatatatatttcagctgggcatggtggctcatgcctgtaaaccccagcacttcaggaggctgaggcgggggtgaatcacttaaggtcacgagttcaagaccagcctggccaacatgatgaaaccttgtctctaataaaaaaaacaaaaattagccacaggcgtggtggcaggcgcctgtaatcgcagctactcgggaggctgaggttgcagtgagccaaaatcgcgccactgcactccagcttgggcaacatagcgagactccgtctcaagaaaaaaaaaaaagatatttcaaaagcttcagctttaatggttgcataatggtctgtcataatttaacagttccttttttcatagatttttttttttttttttgagacggagtctcgctctgtcacccaagctggagtgcattggcgcgatcttggctcactgcaagctccgcctcccagcttcatgccattctcctgcctcagcctccctagtagctgggaccacaggcacccgccaccatgcccagctaatttttttgtatttttagtagagacggggtttcatcgtgttagccaggatggtctcaatctcctgaccttgtgatccacccgccttggcctcccagagtgctgggattacaggcgtgagccactgcgcctggccccttttttcacagattttcatttctggtttttctgtgttataaataacacttttaggagcatccttttacataaatctttgtccatatatgtttatttccataagaaaattttctgaagttagaatttctgggtcaaagattatgaacatccctttctggctcgaggctatatattgccagcttgtcctctagaatgagtgtgacagtttatactcccacagcagagctggagacagctcttacttctgcctccttgctaatattgaatgttgtccttttttagttattttccaattttattcaagtcttttccagttatataagtatacactgttatctaattttaaattgtatgtctttttttttctttttttgagacggagtctcgctgtgttgcccaggctgaagtgcagtggtgagatctctgctcactgcaagctccacctcctgagttcacgccattctcctgcctcagcctcccgagtatctgggactacaggcacctgccaccacacctggataatttattgtatttttagtagagacagggtttcactgtgttagccaggatggtcttgatctcctgaccttgtgatctacccacctcggcctcccaagtcctgggattacaggcgtgaaccaccgtgcccggccctatgtctttttttgagacggagtcttgccgtgttgcccaggctggagtgtagtggcacagtcttggctcactgcaacctctgcctcccgggtgcatgcagttctcctccctaggctctcgagtagctgggattataggcacatgccaccaatcctagctaatttttgtatttttggtagagatggggtttcaccatattggccaggctggtctcaaactccagtctgcccaccgtggcctcccaaagtgctggaattacaggcgtgagccaccgcacccagccaaactgtacgtctttgatcattaatggaggtaactgtctcaatccaacttgctacagtaattgcctttaaaatggacattatggccaggcacattggctcaggcctgtaatcccagcccttgggaggccaaggcaggaggatcacttgatgccaggagttcaagaccagcctgggcaacacagcaagacccccgtatctacaaaaaaataataaattagccaggcgtggtggttcatgcctgtagtcccagctactggggaggctgaggagggaacatcacttgagcccaggaggttgaggttgcaatgagctatgatcacaccaccacactccagcctgggcagcagagtgaggccccatctcaaaaaaaaaaagactccttcagagtcgtcttggaaatagtgcatggctgcccagggagagcgcagaacgccatccccaaagctcccaccccagccttgtgcagggaggaggggcctgtgtggaggaggcctcaggtgaagaacgggatctggcgcacaccctgctcctcggcaagggccgcttcacgctcgccataggccgttttcttatttcatgaaacaggcctcacgtaccacttgccaatctgcttaagtatcctaagctgcttcctctgcccgtttggtattgatcttcatgtttacataatggcctcttgcatgtttttgtttttaaataaaggtggcttggctaggtaggggtctacatgtcttaaaaaccatgcagctaaacccagcaacagagcacctaataaggtcaggctgcacggcagggcacccatcaggtgcaggtggtcggaaagataccaccccccaggtaaagccgtggctcccaccatcaggagaagtcagactttcaggaagagagagctccctcaaccgccatgctgctgtccccgtccttcctgccactggtcacctggagaggggatgagggtgaagtaaaggccagaatgaatgaaaggctgcacttggtgtgtcacctgggcgacagagcaagactccatctcaaaaaaaaaaaaattgtttacctttaaagttatttcatctttttagactgcagtgatgtaaatacagattaaaggaagagtaatggtcatcattaaaggcccccagcctgaactgcgccctttgctttcagctcgcagattcactggtgcccatggagatcaagcctggcatctccttggcaactgtctcggccgtgctgcacaccaaagataacaagcacttgcttcaggtagggggtgctgggtgggagtgcaggggaccctctccccagcaagaaaccagaccacctaacagattatatttgaaatagcgcttcatgtgaattcttgttgaagaattatttccctggccatgtgcctcagagaggctgctgtgcccagagatgaggccgcacgtcatcccaagggctgccacaggcacattctgttggggagcgctgccacacgaggcagggctgtggggagacgtgcagggtggcaggtgcagccctgcccttgggggctggaaccggagggcacctgcgtgaggctgtggctacctgagagcctggtcctaccaatgacccacacacaggtgggtggcacttcagctccagggcaggcactgtgtcttaagaattcctttcagatctggactgtgtcacctttatgccacatgtagagttgctcctagctaccacttaaagtctattagaccctgtgctgggtccttgacccgccttgtcttactgagccgtcagaattcactgctgtcatcatttcgtaggcagcttctctaaccttggccagatggtggcaaaggtggggtttccccctttggtctgaccccacagccagtgtgcccagccacggggtcatgatgtacctgcagcacgacacagtgtattctggagaatttactcagcagatactgaagtgaaccacctgaaaatttaaaaatggatcttgatagaaggcagagatcttagcgaataaggtgttggtaggctggacagttgagcattagagcgcgtggatctggggctcccggcagccagggaacctgaaccgagtgccggctgaggaaaccgggccggggctctgtggcctgtgaggacaggatagtctcaggctctcagtgtggcctgcggtggcccctgctgctcagaggaagctcatgaaagccactctttccttctgctctagccccctcctcggcccgcccagcccacgagcgggaagaagagaaagcgggtgagcgatgacgtaccagactgcaaagtcctgaagcctttgttgagcggttccatccctgtggagcagttcgtgcagaccctggagaaggtgagctggtttcgctggtgccgtgaaaactccacacgtggcagcctttccctggctcactatggccccctggctgcagggagtggatgttgctgcttgtcacttagtccccactgtcctgtggcatctgtttggtctaaggtcctgctgggagacccaggagaaagaaagcagagtgaggagtgccccatccttcctcccagcacgaggtcaccagaaggcctctccagactgaagaaaaagctgcttccacacacacatgtgacgagtggggcagggtagtgaggccaggacaaagagggacccggccctgccagagtcttgcacttccacagatgactccttgctgtcagaggggagccaagtctccagtcgactgtcaggatttgcaggaggcagtcgggggaggggacactggcccttcccctctgtctcagcagccctgatggctgcttctcccagagatgagatttcttgactatgattaaaagaaaaaaatctaaccttaaaggttgtaattttggcttcagtcacaggacttcagagatgactttattaggattatagaatctttgataggaagaaggaattggctaaaggtaatactgttcatgctgctgcttgcaagaactgcaacaaattacaatcattacaaggaaggagatttctatgaactttctatccaatgtaaatatcacagttgccgactttcaaatcttaaaggctttccctttcctaggattggttttctccacctgtctttgattttcccgtagggaaaaaggctctggctgggtggttgcggctctcttccaccctccctgaagaccttgcagggctcctgggccctgttaatgggcctcaagctggacttttaaaaacttaagatgaggaccttctgcctggcccagcctatgtcctgacccagtgttccatcccggctcctctctgcagaaggagcaagcacctgtccaagtccctaggggagcctgcagccatgaagtacaggtggcctccccacaccgaggcccttcacctgctgtgtgtctgtttcaggcacatgcctcctttccatgtcacgtctgatttgtaaggaatttctgtccttagcattagcaatagctgagaagtttgcactgctgccttctctccttcactcttgagagggctctgccaagtcccacaggggtatcttggtgtcacctggcattttcctgggagctcagacagctgaaacttaggagggagctgtcaccagggaacggcatggtgcaagcagctgagcgtcccagactcctgaacacagtgcttggacgtgccctcaaagaactcacaaaagcttagccaggttgtggaaattctgttgttttgcatgagcttttgcatgtttagggtctcttttcaagtataagaaactatcactatcataggcctatgactagtctgaagaattgtgttgagacgtgtcagtttctagaaagttcagtcgagtctgtgaagtgtcatttacagatctcacagatgtgcagtctgcccagcccacctctttcttttcttctggagcagcatggcttcagtgatattaaggtggaggacacagccaagggccatatcgtcctgctccaggaggctgagacgctcatccagattgaagaagactcgacccatatcatctgcgacaatgacgagatgctcagagtgcgactgcgggaccttgtcctcaaattcttacagaagttctgagtgggccatctgagctacttccctgaaatcctgcagtccctcactggctgccctcacaagccacctgaggagtggcatgagaggccattaactgtgtctttgtggtgtcctctggcttaaggagtgaagaggtggctcttgagggaaatggtctggacttattcccagcactgtttcaggcaagaactttccctttcaacttcaggctcattttcttctcaactctggctctctcaaggagctggagggtggcagaagtgggacaggagaagttttccaagaggttcatgggaggcggaggtgactggctggctgtcttgcatcagtcccaggcctcggccaggggagccagcctttggtttcgtttacttgcctacagtgctgtacgcaataagatgatgatcccaaaatatggtaaagtgaacccatctgtctgcattttctactctgagcccatttgttaataaacacttatttttatataattagctgtcctctgttgaacctaccatctatatattgatttagtagctgaaaaaatatgaaaatatacagaacagcatgaacttagaaaacaccacaggaaattgaattttgatgtgtatgttaaatcatataatttgcactgtttataaaaacacagatctgtttctccttacattgcataagaaggtgctcacctttaagctgtggctgcacggagagtgatgcaggtcggtacaccagcctcaggctccacctgcaccgcctctcccacagatcctcagtctctgcattaaaccgggcgttactcacagataccctcagagccactggtcgtaggaagctttcagacaaaagtaacctcacaaaagatgactgcttttgaaatgtataaaaccaacagttaccaggtgaaatagcacgagctgtgacacccaggccaactttgcgagtattaagaacaagtcttagccctggcaggcgatgctagatagtatgcccagcgcaggctattcttaaccatcttgttggagtgattgattgattgaaattcactcagaagtcagtcctccaactcggctgacaactaaacagcacacagggatttagtgacccaataaatacataacatgaacagctgcagaactgactgctctggctttatggcgcattatcactcctcttggaacaatcgtattggtgggaatgagtgcttcgctaaagcagggaaaagactacttcatgtttgccatctccaaccttgccaaacctgggcatgggaatgcttaagtaggtttctaattttccaaggtttgggtccactccagtcaagggataggctacagaataaacgagaggcttccaaccatggggcaggactgacattacaagagatgaatgtgccatggctatgaacatttagttttctttttagaattgcaaatagacatcccaagcaggcatacttccaatagaacctttgaaagaatcaagtgaaattaaattttaaaaacatctgagggccaggcatggtggctcacacctgtaatcccaacactttgggaggtcaaggcaggcggatcacaaggtcaggagttcgagaccagcctggccaacatggtgaaaccccgtctctactaaagatacaaaaaaaattagccgggcatgatggcacacacttgtaatcccagctactggtgaggctgaggcaggagaatcacttgaacccggcaggtggaggttgcagtgagccgagatcatgccattgcactccagcctgggcaacagagcaagactccatatcaaaaaaaaaaaaaaaaatctgaaatgcaaaaacagtgtaagctagagctcaggagaaaccaaaaatggttattttatttaaatgtcctagcaatgctatctaggaatgatgggatctgtcaagcctgtctgccgtgaaagggcttgatcagagagcccagtgctggtcccttgaggggggttgcaaaagaagtgagcagtaagaacaagcgagtcagtgggtgcccgatgaacagggtgcaacttagtaggttttaatcaagtcatcaccacccacttagtggcagaagtcagaggcaggaagcagcaaagactcatgctttataaaaagcagagagaaaatccagagccggcctttccaggtatgagaagagcagttatgagtaactgcctaaagttcaggtatttggataccatgccaggttggttagaagactccaaagaagtggcataagtggcagacgtggcctggctctatcagaaatgcggcccaccgacattaactgacattgactgacactgacatcaacctggcgaagactctgacatccagaaaagtttgtactcaaacccagtggaatcctaatgattaattgaaaaaaacttaatagtgcagagacctcatattatttaagtcttagtacaaagtgatatattaggtatctattgcacaacaaattaccccaaaacacggtggctcacgcctgtaatcccagcactttgggaggccgaggcgggcagatcacgaagtcaggagatcgagaccatcctggctaacacggtgaaaccccatctctactaaaaatacaaaaaattagccaggtgtggtgggcgcctgtagtcccagctactccggaagctgaggcaggagaatggcgtgaacccaggaggcggagcttgcagtgagccaagatcgtgccactgcactccagcctgggcgacagagcgagactccgtctcaaaaagaaaaaaaaaaaaaaaaagaaaacctgacttttctcatctcactgtttctgtggtcgggaatctggtgtagtgtggcttagctggtcgaccctggctcagggtctcctctccacacggctgcagtcagctgttgggtgagggaacagagcttaagtaactttccgcagaaccgccagtgagtggcctctgccttaccgcaacaccgtgggtgagtatcaggtcagcagccagccaggaaatggcaatctgtcttttaggccattgctttccaagtcacatctactccatctctcctgatccctgaagagcttgaagcttttggccctcacagttgtcctataaaggcatttccaaactgtaatgaagtatcaacagaaacaagagtgaagaaacctttaaacctgcataatgacatattaacaagagtcaagcaacgagtgggaagggaaggaggacacttttcctctggccctgagtccagtttttttcctgcagccaagaggagtagttaatgctgtctcactgctttatgccatctataagaaggtagacaacacttatctttcaaatgcactgcagtgggactacacataaataacagtagtcttctttgaacctaaaatagagtggaaataaccaatgacaattatggaggaagtcacaggtaaatcctggagaccagcagtgccaagctgagccacagggccattctcactgtagacttgagccagcctccatcaggaactgatcttctaaagatcaaataccagagtctccactgctccttggcagcccattatgggttttaatcacatcataaagcattatatacattatggccaggtacagtggctcacacctctaatcccagcactttgggaggccaaggtgggtgaatcacaaggtcagaagttcaagaccagcctggccaagatggtgaaaccccatctctattaaaaatacaaaaattagccaggcgtggtggcagatgcctgtaatcccagctactcaggaggctgaggcagagaaatgcttaaacccggggagggggcggggggatggaggttgcagtgagccaagatcgcaccactgcactcccgcctgggagacagagccagactctgtctcaaaaaaaaaaacaaaaaaaaaaaccatctatctatctatctatatatatacatgtgcacacacacacacacatgcacacgttaaatgtaaacttttgagacacaggaccacagatctttgaaaggggtgtaaacgcccatctccttaggcatgtagaatatttcttgcttctcttctgttggcattgcaggccattgaaaaaaatgtgcaaagcccccgtgtaatggtgtttgtgttagaaggatttaccctttacctttttctacaataaacattcctaacccatgtgtaagcctccctgatgtagttatcaaatcaatcaccagtaaaaagtaacttaattctcctacaataaattctgagttaccaaacacattatcaattaaaataagtttgctaacgtttccttaaattatccaatataagtttttactctagtaactatttacatttgcttcacatactttggaaataatggactttcatttcacaaagcctttcccaatcatcagtaagcaccttccagtcatcagtgggcattagtcggcagctgctcacatattcggtgtgttgtgccctctctcatggctttagctcaccgtcacagataagcatttctcccagacttacagctagagaggagcacatttccaggaccatgagcaccctgggggcagggtctgttttttccaccttgtcccagcatgaggcttgtggaagaaggtaaggaaagaaaatttcagaaatatttaggaattacaggccaaaacaacatttcctggtgggtcagttttttaactgcaatgttctaaacatgggaacctgcacataagtgtaaaaatccctatcatttagcccatgctttaaaatagctactcgattcagtgggcagcttcctgatgagatgaatcagaggttggtaactgtggccgaaaagccaaatctggcccacaagcagagttgttagaaaaaagatgcaacagaaatcacatgtggcccacaaagcctaaaacactggctgaccctttacagaaaaagtatgccaatccctgctcaagtgctgtgtgtgggaacatttctgtagtttattcaagtaaaggtcaaataatggaatggcaatgtaacagctcccatcagacctgaccctcctagaggtaaaactataaactccagacgtatgtagttacgtaagtaggtagatagaacaacctaccacaaaaaaacaattccattagagattttatcacccttgtaataattattaaaacaactagacaaaaaaaaagtcatagatgacctgaacaaaactgtcaaaaactttgacttaattgatactttttagaatacttgctctgcagcagcagaatgtttactatgaaaaccatatgctaggtgataaatctcattacatctgaaaggaccgaacgcatacacaaaaccttctcccaccacaatggaattaaattcaaactcaacgaagtattttggaaaaccacaaatatttagaaattaaacacttctaaaatagctcatggatcaaagaagacatcccaaaatgaattggaaagtattttgaacagaaaattaaagctcaacatgtacaggatactgctaaagtagtgcttaaaagtcatcttatacctttaaatgcttacagaaaaaatgaaagacctaaacttgatctaaatttttaccttagaagactataaaaagagccaaataaacccaaagaaagtagaggaaagaaatcataaaaataagcaaaacatgagcaaaacagaacagagaaaactaacaaagccaaaagctgattttttaaaacatcagcagaactgatacacacctcattagactgatcaaggaaagacaggaccgactgcccatatgggcagtgaaaaaactttggttatcactacagatcctacggatatgaagaagacagccaatcagaaaggaaagaggggtattactaaagagcctacaaatattaaagggataaaaagaacaccaacttatgccaacagatttaccaccacagataaaatggaaaatttcctttgaagacacaaatagacaaagctcattcaataagaaaaagaacttgatattcacttaagaaattaaatttattatcttctcacaaggaaaactccaggcctagatggtttccctgggaaactatcaaacatttaaggaagaaataacaccaatcttgtataacctctatcaaaaagaggaagggggaatattccagtcccttttaaggggccagcataactctaataccaaaaccttataaagtcattaccaaaaaagaaaatgagaggtaaatatctctcatgaacatcaatgcaaaaaaaaaaaaaaaaacttaccagcaacctgaatccagcaatacacaaataggataatatgacatgaccaagtagggtttatccctggaatgcaaggataattaaatatttgaaagccaatctaatttataatagaatagaggatcatttcaatagatacaggaaaaaaagcatttgatgaaattctctaacagcactcagcagacaggaataaaagggaacatactcaacctgataaaggttatgtatgaaaaacttaacagctcagtgaaatactagagcttttccccaaatattgagagcaaagcaaggtgccgatccatactactgttctatggtgttctcggagtcccagtcattgcaataaggcaaaattgaagaggaaaaggcaggcaggcatacaaacagataaagcataaaggtaggaaagaagtaaaactgttttcagatgagactttttacatagaaagttctaagaaatctagaaaactactggaataagctcacaagactgcaaaatacaaggttggtatccaaaagtcaactgtattttatatattaacaagtttttgagagagagtcttactttgtcacccaggctgaagtgcagtggcacagtcatggctcactgcagccttaaactctcagggtcaagtgatactcccacctcagtttcctgagtagctgggatcacaggcacatgccactgcatccagctaattttttttttctttttacttttatagagacccaccttggcttcccaaagtgctcggattacaggtgtgaggcacaacacctggccagaaataaaatgtttttaaaacagcaacttcattcataatagtgtgagataacttttgaaaagatatgtaagatctctacactaaaagtctcaaaaccttgctgataaaaattaacgatttgaataaatggagaaatatgccatattgatggattagaatactcaatactaacattttaattctgcctattgatttatggatttgatgcaataccatcccagcagacagccacaccacaacctaacccaatgttttaagtaggtaaaggacttgaataaacatttttccaaagatgatacacagatggccaatagcacataaagagatattcaacactggtcattagggaaatgaaaatcaaacccatgaccaggtaccacttcacacctactaggatggctgtaccatttttttaaatttttatcagaaagtaagtgttgggagaagtggagaaattggaaccttcatacgctgctagtggaatgtaaaatgacacagccgctacggaagacggtttggcagttcctcaaaaagttaaatacagaattaccatattgtccagcaactccactcctctatagatacccaaaagaattgagagcagggactcaaatatttggccacctatgttcttagcaatattattcaccaccttagtaaccaaaagatggatgcaacccaagtatccaccaacagataaacagataaaacaaaatgtggaacatacacacaatgaaatattatccactcatagaaaagaatgagattctgatacatgctgcaacgggtgaaccttgaaaacatgctaagtgaaataagccagacacaaaagaccacatattttatgatttcatttatattcaaatatccagaatagatgaatccatagagagagaatagaggttatcagaggctggaagtagtgggggaatgggaagttactgtttaatgagtacagaatttgttcgcaatgaaacagttttgtaactagctagtggtgagggttacacaacattgtgaatatacttaatggaactaaattgtacacttcaaaatggctaacatggcaaattttatgtttaaatttttttaatctgataatgccaggtttcttagaagagactgggcagtattgagatgaattttatgtaagcataagagctaatgtacaaaaatcacaagcattcttatacaccaataacagagagccaaatgatgagttgaatgctcattcacaattgcttcaaagagaataaaatacctaggaatccaacttacaagggacgtgaaggacctcttcaaggagaactacaaaccactgctcaatgaaataaaagaggatacaaacaaatggaagaacattccatgctcatgggtaggaagaatcaatatcatgaaaatggccatactgcccaaggtaatttatagattcaatgccatccccatcaagctaccaatgactttcttcacagaattggaaaaaactactttaaagttcatatggaaccaaaaaagagcccacattgccaagtcaatcctaagccaaaagaacaaagctggaggcatcacgctacctgacttcaaactatactacaaggctacagtaaccaaaacagcatggtactggtaccaaaacagagatatagaccaatggaacagaacagagccctcagaaataacaccgcatatctacaactatctgatctttgacaaacctgagaaaaacaagcaatggggaaaggattccctatttaataaatggtgctgggaaaactggctagccacatgtagaaagctgaaactggatcccttccttacaccttatacaaaaattaattcaagatggattaaagacttaaacgttagacctaaaaccataaaaaccctagaagaaaacctaggcattacccttcaggacataggcatgggcaaggacttcatgtctaaaacaccaaaagcaatggcaacaaaagccaaaattgacaaatgggatctaattaaactaaagagcttctgcacagcaaaagaaactaccatcagagtgaacaggcaacctacaaaatgggagaaaattttcgcaacctactcatctgacaaagggctaatatccagaatctacaatgaactcaaacaaatttacaagaaaaaaacaaccccatcaaaaagtgggccaaggacgtgaacagacacttctcaaaagaagacatttatgcagccaaaaaacacatgaaaaaatgctcaccatcactggccatcagagaaatgcaaatgaaaactacaatgagataccatctcacaccagttagaatggcaatcattaaaaagtcaggaaacaacaggtgctggagaggatgtgcagaaataggaacactttttacactgttggtgggactgtaaactagttcaaccattgtggaaatcagtgtggtgattcctcagggatctagaactagaaataccatttgacccagccatcccattactgggtatatacccaaaggactataaatcatgctgctataaggacacatgcacacgtatgtttattccggcactattcacaatagcaaagacttggaaccaacccaaatgtccaacaatgatagactggattaagaaaatgtggcacatatacaccatggaatactatgcagccataaaaaatgatgaattcatgtcctttgtagggacatggatgagattggaaatcatcattctcagtaaactatcgcaagaacaaaaaaccaaacaccgcatattctcactcataggtgggaattgaacaatgagaacatatggacacaggaaggggaacatcacactctgggactgttgtggggttgggggaggggggagggatatcattaggagatatacctaatgctaaatgacgagttaatgggtgcagcacaccagcatggcacatgtatacatatgtaactaacctgcacattgtgcacatgtaccctaaaacttaaagtaaaaaaaaggaatatattatgaaattataaaattgaaaagaaaaggagctaatgccatagaactaattctaaaatttacagagaaatacaaagtaactataatattgaaagcaatcttggagatgaacaaagttggaaagctgcattcatcaagaccgtatggaactggcacgaggatgaacaaagcagcataacaacaaagatggttcagaaacagagccccacttctataatgaccaccttttcaacaaagggaagggaaagtctttttaacaaatggtgctgcaatgcccatatagaagaagtatcagaaacctgaccactgccacacaccataaacactgagatggatctttaattataagagctaataccataaagcatttggtgaaaaacactgaaaatatcttcatgatgttgggtaggcacaggtttcttgggtcacagaaagtagtaacaagagaattgtatctcctcaaaattgaaaacttctgctaatcagacgacaccatacagaaaatgattaggcaagccacaaattaaaaaaataatttacaaaacatatctgacaatggactagtgtccagcgcaaaaaattcctgtaactcagcaataaaaaagactaaatacatccatacgatactattcattgagaaaagaaactggttatcaaaccgggaaaaagatacaaaagaaccttaagtgcatattatattacatgaaagcagccaatgtgaaaaggctacatgctgtatgattttatgtgacattctggaaaaggccatagtgtgaaaacagtaaaaagatcagtggttgccagagattcagagagggagggagggaccaataggtgcagcacaggaagtttttaggggagtgagactgttctgtgtgagactgtaatggtgaatatatatcattacatatttgtcaaaacccatagaacatacaacacaatgaatgaagcctaatgtaaacccatgggcttgagtgaataatgtgtcaacactggctcatcaattgtatcaaatctatcacactaatggcagatgttaataaaggacaagtgaggggtgaggtggaagaagaagtctctttgtacttctcatgcagttttgctgtaaatctgaaactgctccccccgaaatctattaaaaatgtaggaagaaaagaaagcaattcaaaaaaggacaatccagtttttcttaatgggcaaaagatgtgtacagataattcacaaaggaaatatatataaatggcgtaaacacatgaaaaggtgcttaaatcaccagtcatcaggaaaacgcagaatgaaataagacaccattactcaccagaatggctaaaattaaaaagactgaccagaccatggatcagtgaggatgtggaactgggagtctcataattactggtggaagtacacaatggaatgatcgcattgagaaaaggtctagaagtttcttacaaaactaaacatgtatacatctaccatattacccaacaattccactcctaggtatttacccaagagaaataaaaatccacagaaagacttgcacatgaatgttcacagaaactttattcataatatccaaaaactggaaaaagccccagtacctatataatagaacggacagattttactcaattcatacaagggaatactaagcaataaaaagtaactaatcaccaatctattcagcaacgatggatgcatctccaaaacgttatgctgggtgtgtagaagacggacacacacaagagtagaaattataggacaccatttatatgaaattctagaatatggaaaactaatccaaaatgaaaaaaaccatcagcattggctatgtctgaggatggaggacgtggggactgactaggaggaaggagcaggaggggactttctgggttgatagtagtgttccatatattgagaggggtctgggttacacaggtgtgtgcatttgtcagaactcaaaagaatgcacactgaagatgtgtgcattacagtgtgcacgtttaaaataaagtttacattaaaaacacaaacattgacctataatgaacagttgtatgcccatgtatttagaaggaaatgcattgatgttgccagtttactcagaaatgtacctcaacagtgcaccatgaaaggatgaatggcaggatgggtgaagggacggggcatgggtagatgggacgctccaaggcgggtccagtaaaatgacatagacatttatgccctagaaatgatttcaacattgccgtatgtttgaaatgtgggaccagtcgtttaaatcaatagaatgtaagtagtttcaatgctaacatgacagtcctacaacaggaccagcagctgtactttttttttatttttatgagacggagtttcttgttgcccaggctagagtgcaatggcgcaaatcacagctcactgcaacctccgcctcctgggttcaagcaattctcctgcctcagcctcctgagtagctgggattacaggcacgtgccaccacacctggctaatttttgtatttttagtagagaaggggtttcgccattttggccaggctggtctcaaactcctgacctcaggtgatccacccgccttggcctccccaggtgctgggattacaggcgtgaaccaccgcacccagcctgtactctttcataaacgtcaagacagatgaagaaaggtaaaacaatttgcctaagctgtgatttctaagtgaccctcttcactttgtcaaagcattcattcatgagaaaactatggaactcctgtgttcttgagaggctgcagtccggtgtgggaggcagagcagtggccagcacacagcatggtgaggcgacagagcgtgggggctctaataggaggtgagcagggcactcagccaggcgctggcgctcaaacctagtggaaggcagaaagagccatgaagaagtggacactattttactccagtaatagttcatttttattgtgtcaaacagtggactctacgtatattatattatttaacttttaacatatgcttaagagatgggcacaacttttgccaccgtatggtgggattagagcctaaaatagtaatagataacttgctctccaccagtgtgatgggcagcccaagatctgcacccagtctgttccagggcccagacctttacccactacattctcctttcttcttttcagtatcttcataacattctaatttttttgtagagatgggggtcttgctatgttgcccagactggtcttgaactggcctcatgtgatcctcccacttctgcctcaccaaatgctgagattaagatgttaggcaccacacaccaccatcaacattcttcttaacacatttttgtaaaccttgtggagccttccacttcagtgatgatcccatcaacagctaacatttaccaccttggcagaccgtaagtccaagacacaactcgacaggtatagactcaaagcagacatcatatctctgtgtataggaagacacattttctacagcctcatgccaccttctcaagtctctctggtcccaggacaatcgtaacatggagatggatggctggaagaacaggagcttgacagccaaaactccagacccaaagaggaatgcccctcgatgacatctcacccatcagctgctgcaaacttgcctgatcagtcgtgaaccccacttgaggagggacaccaactgttaagtctcacccattcttaggactgtcagtgtgaccaaagctgccacctgcagagcccaggagaggagtcctcgcctttaccccctttcccatctccatccttctccccgaagcccacagctcagtgccctctcctgaggaagcctctgatcccacagccaagcacaagatctaggcctgtgggcaccaacaggatggggctctgcagtcagggagcgtcagctcggtgcaggtacaggtgccttagtgacctataggtcaggggcatgacctatggaccgaatcgagccattcacagtgaggcctcacctgtcctgggatcgcaggcacacacagctccccacaaccactacacacacacacacacacacacacacacgcattttaaattcccatgaaaaaattaactttgcatatatgggccacatgcccttccacatcctgcttaaagcacctcaacagcccctaagttcctgttttgtcaaaatgacttgccctggaaccgggcacaggcaaggctgcccatgtgagtgtgagtctgttcacccatctctggtccacagcccacaccagggcctggtcaggctgcctcccatcgtcttctgcgagcaggcccagctggcatacacaggtggcgacctggaatcaagcaatcaagcaggtgccttctctcaggtcactcttccatacttgctgaggaaaaccacaaaagacctccaagctgcttgagttaaagtctccatttatttttatttttttacaaaaatccaatgtaagaccattgtgctcgtgacgaaaaggggtggggtggatggacgtggcatggatatcaaagcttccccccacaaactaggagctccccactctgtccggcgcagctcccagaaagatcccatccttccggacaggaccccagctggtgagccctggcctgaggcacagtccacacggaggagcactgcccagggagccagcgctcacagtggcctgcagagccctgggacggtgttatggtaagacagcccaaaccggagcagcaagccggccacccagagaacgaggcgctcctgcaccctgcgagccaggacaaggtggccaggggcggcccacagacagccaaggagacccggggtctgtggcgccgctttcccatctcaagcgagtcacaggtcggcggctttcccgtggtgagaagcacctgaccagtgacactgtggccaccttgctgcctctcgctgaggagggcgtgcccctcagagcctgtctgcagtccttcaagccagtgttcctttcagggtcaaggagggctgtccttgttggaagcaccggcaccacagccctccctgcggcatgttttggtgtcagaccactcagcccttcttagatccaccagtgacattcggggcccgacaacctggctccactaaagggagaggccctggctccaccacacagacggccccagctcactgagtcccgctaaagggggtcccaccacacagacggccccggctcaccgagtcccactgaagtcagtatgtgagttcctcacattaaaagaaaccagatgaaatagcagccacaatatagcgccacacaccacactctttggctccccgagggaagaaggctactgctaaaaggaatacaagtcaggagtcaggtagagggcaactagaaagttctgaggaagggcgtctgacccccactgctgggaacataaccacactgcctcagcaggggagctacaggctgatgctggggttgggggcggggaacctttggaaacacagtcctggcggcggccgggtccggtttgccaatggggagagttcccttaagccgagctagccctacaggtgggtgggagctacacaaaagagcccagcttcaaaacagtacttgaagaggacccacgtggtacaggcaggtcagaggagaacgtattccaagaaatagaagcacaggatgccaaggtctagggaagacggaactggcttaaggcatgtgcatgaccaggacaaacctgagcttttgttcagttgctagaaaacttccagagtcaactccacttccagaaagtagggttcaagaaacacgtcatgggctaaatccctgacaaatgccactcacaccctcctaggttcccctactgccaccatgacccaaaaaattagcttatttcagtttcagcccagggaacagaatcctaagcagggagtggaaagtggtaactcgggttgtgaatgcccgttagattccaaggctggatgtgagcttacacagcaaatcacagcctcccattgttctagcacataccaaacctcggggagtcctacagccaagctgacattaggggtccaaaaaccacagataacacaggatggggctccagacagaggcggggggaaggtgaatttcaccaaggaattatcccaaggcaggcgccttgctgtaaaacttcccggccagccgggtgggttcctcgaaggacactggcttgctctacactagggagaggaggctgacctgcaaaccacttcagaccacagcagatgtgcacgctgctgatctcctgtccaatccaagaaagagcacttcagaaacgcctgaggcccacagcacgtgtgtttcaacagaagagcaggatagaaagagccatctgggagtggcgtcttcagcccctattctttctcactctttgcttcctcattctctctcaaacaagagagaaatgggagagcagggataagtacggaggcaagcctggcctaaagataaatcctcaaaaatcgctggccccagcagcaggaagctgaacagcccaccagggtcaggcgctcccagggattcactgggaagagaatgtgagttacaggttgctgactggcaacagaaagggtaaggaagagaccttgtccaggcccgcaagagggccaagttcatccctttctggttgctgcacacagatggcgctggggaggatgggagatgatctttaaggataagccagtgacacaaggccaggacccatctccgccagaatacagaacaaaggagcctgcgcggtccctcccttagaaaggcaaaactcacactcccccagccaaaaatatatatgtatgcaagtgtgtgcatgtatttatatacacacacatatatataaataagccttgaatggcaaatctgaaactttctctttttaaataatcataatagttgttattgaatgtaaaaaccacgaaccagctgtcctgggcgtacgaacggtgtgagtgactctgcagagtcgccacagtcctcagtgtaagctatcagtcagtgccctgtgtggggaaccccggggactccgcccagggctccaggcccagtgtggctgacttcaagataaaggcagcggtttccttccactcctcctgctgccccttccagcagaggctctgggccacccaccagcagatgtgcccaaggtcctgcaatgcctaggaaccttgggagccatcttcctccctctgctcatcctcttccccagaccgtgcgctgcccctagatgaacttgaagcacttggtcttgtcatggggcaggcgtgtcttgaagagcacagaatccaccctgaactgcgtgtacaggaggggcatgtagccgtacaccttcacgaagaagttgatgcacttgtgccgctcgtggaagtgggagtcatcatgagacagggcctgagggcatcctgggcatcggaatgtccaccgtgaggtcacctggaaacgggagagagagacagagtgggaatcccagctaatactgacagaacccttgcagctgagccgatcccacactcccatgtccatggtgaagacgctgatcccctcaggggcaacatccctgcagagcatggcaggaaccagagcccggccccaggcctcctgcctaccagatgtctccagaacattgtcaggtattctgttgagatggcctacgcttctcagatgccaaaagccttaacgtgtgtagtgtcagctgtctcagtaagtctactcctagtatgtacttggttgcagagccataggtaggtaccgagttgtttgtttcatcaatgttttgaatcaaaatattgaagactacccaaagaggggctttgggtattgaagactacccaaagaggggctagtcaaagaggggctatcattcttgaatactgtccataaaaaagatgcttaactacatttaaagccatgggaaagtggccatactacagtctagtcatattattattaattagaaaatgtctaactaaaaaagtatgaagagggacagcttcattacaatgtggcaggccgaatggcataaaaacccctcagaacacctgaacatgcaagaagaaatacataaaccatctctttaaatacagggcagagcctgtaataagaaatgaaattacctggtgattaattccagcactttgggaggccaaggcaggaagatcgcttgagcccaggagtacaaaaccagcctgggcaacaaagcaaaacctcatctccacaagagataaaaatattagctgcgtgtggcagcaggccagctatctggtgtagtcccagctacttgggaggctgagatgggaggctgcttgagcccacgagtttgaggctgcaatgagctatgatggtaccactgcactccagcctgggtgacagtgagaccctgtcactcactcacatacatacatgcatgcatgaataaacaatgaataatgaatgaatgaatgaatgaatgaatgaatgaaatcctcagaggccaaacaatgaaaaagcaaatcctgcaagatagccatgaacttgggttttaaatgggctggagaagtgacacctgcaaagcgggctgggggcctttggaaacactggctccatggaggggagcagggaggggtggacgcctcacaaagaaagatggggaagaagtgtctttaaatttatcttctacttccttttcttttcacctaagtctgatctttttatcccatttcactgaaatttaataactatgattctcattttcaatagttccatttagggctttccaatctgtttgttctttttggagtgatttgttgcttttttatgttttcaggttactaattttaagcctacttgttttatagtctatctaatggctttattatttgaaatccttggagaactataacctgtttgttatatgtgttcactcctgctcatgatcagctgttttcttggtggctgactgttgactttacatttcaagctcatcttcaatgaggctttacctgtgcgtgtcctatgtgacctgaggtgaagaaatttctctttttcttaagtgggaacttcctctgctgagagtaatttctccttataacagatttttggttttattttgtcaaacagtccaagggtatcgacgactgggtctagttttcttttttgttttttccctggggactccccatattgcccaggctggtctggaactcctggcctcaagaaatcctcctgcctcagcctctcaacatgttgggattacagacttgagccatctcatgtggccctgggtctagatttcatacagaatgagtccctaagcccatggaggctcaaaagactatttaacattctcaacctacacttccccaacaacctgtcagagtcaaggttaaaataaacaaggtatgtgtcatctccccggggcaacgggtaggagatctccattctaattctccacccttaacaggctctacactccttcacatgagtgataaaatccaagcctctagacaactaaggtgagagcagccccccatggtggcctcagtgatgccaccacgcttgccaccctaagttttagtcctcccacctgcttcctttctggcaattctcttacctttttattagctcaactatacactgaaaaaataagtttgttacttatagtgatcaggttttcaaactacctaatccactatagtacaaaacccaaaaatttactgtcaagtttttttttttttttgagacagtctcactctgtctcccaggctggagtgcagtgcggtgatctcggctcactacgaactccgcctcccaggtttatgccattctcctgcctcagcctcccgagtagctgggactacaggcgcctgccaccacacctggctaattttttgtatttttagtagagattggttttgctgtgttagccaggatggtctcgatctcctgacctcgtgatctgcccgcctcagcctccccaagtgttgggattacaggcatgagccacagcgcccagcctactgtcaagtttttaaaaagcagactgcaaatcaagtatataaatttaaaatataaaaataaggccagatgtggtggttcccacctgtaatcccagcactttgggaggccaaggtgggcggatcacttgagctcagtttgaggccagcctggccaacatggcaagaccctgtttctactaaaaatacaaaaaaattagctgggcatggcgacacatgcctgtaatcccagctgctgtggaggcttaagcaggaaaatcacttgaacccgggaggcagaggttgcagtgacctgagatcgtgccactgcactgcagcctgggtgacagagcgaggctccatctcaaaaaaaaaaaaaaaaaagaaaaagaaaaaatacatatatacgtatttttacacacatatgtgtatatatatatgtatgtataaataaataagtcaccacgatagacaggataccagagaaccaaaagaaataagccaaaagttttggtacttttgatttctttctgcatgtctatcttttctcaaataatttttaaatttccattataaattaaggggaaattttttaattgaaagacacatcccataacttaatagtggaagagtaatcattgtgtacagccagtatgcgccgtcagagcccaggtcccagagtttaaactgggaggagacacaggccagtgctcaaagggtggctcccctcagaaccgagtctctggacagtcatgacctccacaggtccccctccagggtcccacctgtctcctcacttctcccctcactcactgctgctctcttagaacccttcggggtcacgtcagcactgagttattgctcttccacggttcccactggagcaggatgtaggggtcaggaatctggggaaggatgttctcaaacagcatctatgtccagtattccatggggctctcactggatctaaaaacctttctcatcattccagacaccagaatccaaccccaggagaaatgccctttaacctgcacattattccatgtgacacaaaaggtgactttataactgttgttttcacggaagcagtggtttccaaatgtttttaatcatgtaatccatcagtaaaaaaaacatttaagctgggtgcggtggctcacacctgtaatcccagcactttgggaggccaaggcgggcagatcacgaggtcaagagatcgagaccagcctggccaacatggtgaaaccccttctctactaaaaatataaaaattagcggggcgtggtggcacacgcctatagtcccagctactcagaagactgaggcaggaaaatcgcttgaacccgggaggcagaggttgcagtgagccgagattgcaccactgcactccagcctagcaaaagagcgagactccatctcaaaaaaagaaacaaaaaaccatttaagactgcatccccaatatatttgtaaatatataactgtgttacataataaaacatgcaaaaaatttaaaaagaatgaagcaactataatattaactgaagtctggacatttacttatttaaccaatatcgtggatcacagtttacatggaagattccaggtaactcaatctaagaaaaatattcgttttatgcttagtaacaatgaggaaaatccttgatagctgccaagaacctatatcaccccagagaaccaagacgttcacttgcatttcggcttccttaccacctaagccatctgttttctcaaaactttacaggtgacttttcaatctcttatcctgaatgaagcctatttatattctgtgttctccttgcaaaagtagtacattattcaaagaaataatatgacattaactccccattcgttagtcaatattaagatattaacattattgaaagaacactgccaatcatacgaagcagtcaaacctccctaactcaaacaaggaatagtttgacagtaaaaatttgaggtatttaaagcacaacaaaaaaattactatttttgaacataaaatagtacatatacctgataccattaaaattaggtaaataaaatatttaattcaaactggttctttattatgaagtaaataattagattcataagttgaaggaattactaagagttagaaaacactcttaatttcagcctttgaatttgaaaagtcatcccaatcttgaattcttcatatattccagaaagatgaagaaaattcacagagaatactcagttttgaagttttcacttggtaagaatcatgtgcaccatgtctaaattacttccacctgcactgaagagatggcttaactaatgaaacactggcctaataatgcagtagacaaacacactttaacaaagatgaaaaattccccatgtctgtgcctgctcaggtaactgatgctattattaggtacctaatcactcagatactttaaattttcatggaccatgtcttctggtctactagagaggcataaattgatgcatacatcttgactcaagtccagtccctggctacataagaaaggatatataaggaagagaaaattgcacccatcattaattgctttctaaaacctttgcctccctacctcaaagtctacaaaatcttttcactgtttaatatgagacctaccactgtacctggaaaacatactgtttttatataaatacttgtgactatttttcacaatttaaaaaaattgatacattatgttgctaattattcttctcttgtgaggctttagcagaagtctcggcaacagatgaaaccctgggacaatcaggagtgacatcctacgcaggggccacagttggcctccacatgcatttctttgttatgctttgctgcatggaaccagcgtcctctggtggccaccctgcttagcactcaagctacgacttctttctcactacaatgcccaggctggagtgcagtggctattcacagacacgcccatggcacattcagccttgaactcctggattcaagcaatcctcctggctcagcctcctgagtagctgagactaccaggcatgtgccactacacccagcttctaaagatgatttcattatcgttattagtacatgctggtgggtacttagtctagaacacaattattattattattattttctttttgagacggagtctcactcagtcacccaggctggagtgcactggcatgatctcagctcactgcaatctctgcctcctggattcaagcgattctcctgcctcagcctgctgagtagctgggattacaggcgcatgctactgtgtgtgcgtgtgtgtgtatttttttttttttttgagatggagtctcgctctgtcacccaggctggagtgcagtggcgcgatcttggcttactgcaacctccgcctccaggttcaagtgattctcctgccttggcctcctgagtagctgagactacaggtgcgtgccaccacgcctggctaattttttatatttttagtagagacaaggtttcaccgtgttagccaggatggtcttgagctcctgaccttgtgatccacctgcctcagccttccaaagtgctgggattataggcgtaagccactgcgcccagcctaatttgtatattttttagtagagtcggggtttcaccatgttggccaggctggtcacgaactcctgacctcaagtgatccgcctgcctcagcctccaaaagtgctgggattacaggcatgagccaccgcacccagtcgaacacaactatttactcatggcaatgtcacccatgaaggtaaacctatttcataaaattaaataatatgcctttttgataataatgaaaataagacctcattagtttgttgacccttctaaggacatcaggtataaatctcttactggaatttagcattttcttcaattatgaaacagacaaacacagacgaagcacagtcacaaatattcatttggagtgacagattctatagcattattggttctaataacatctgcttctgtgaggactgagctatcctaacccttaccagcatgctctaacttgctgacagagcccacaaagatgacaggaagggggtggaaccaggctttctgtgcactgagtgtatgtgttaatacctccaagaaaaaaacacaacaataccctcagaacttctagaattctgagggtatttttggttgtgagcaaataatttatatagtacttatgtgccaggcactattcttagagctttacatatattaactcagaaattcttaagttttttgtttgatggacatcgcctgtgcctctggcttggcaatctggtcaagactgtagactcctcaaagtaatgtttttaggtatataaactacaatacacaggatgacaaaggaaacgagttacagtaaaacacagtgacatacatgctcttttcttaatgtattaaatcacaacatctaggggaaagggagtaactgccgtgaattcaaagcagtaacaaatacaaacaatactttttgcagatattgcaataaaggtattgtgatatgaagatatcagtgatttctactggtgacaaatcagttactacaaatactcttatgaattatagcctgtttcataactgaagaaaatgctttattccagtaagacattaataaaaataatgatgcaacatctttcccacccaagttccaaaccttctgatttctatccattgcccttaggaatgaagggcccctgtagtaacaactcatttaagctcacagacaatcctttgatgaggtaggtagtatcatccctattgtacaaatgaggactctgaggtacagtgcagttacgtgctgcactactgcaaaacaagtgaagtaaacatgcacgcatccacagccccaccagtggtgggacctcaccttgatggggggcttccgagtgatgtgggagacaaggaagttcatggcaatgtcctcacagttgatgtattcatccaccatgtcccggatggcctggggcatcacataagaatacaggtaggcataatactgtcaggggaagaaaaagaaccacatgctgtgttacaagacacaggttgttggctttcagccaaaatatgcatggatggaggggctgtttgggtgtggcagtaactaggaggtattactggcacttagggactggggcaggggattcgagacatcctgtcgtgtggatcttctgcagtgaggaattatcccattcaaactgccatcatcaccccctttagtaacagaatgtcatatcatctccctggtaccgcagtgattttgaaatcaatacaaagatttgtcaaactaggtcagatgctggttcaattgaacactattttatctctaacaatggccaaaaaaaaaaaaaaagataagtgagagaaaaaagcctggttattttctcagacctcaataaatcacagaaccatgaaacacacgatccctcactgcctcctgtacagattcttgagtctggtcagtactcgccatcggccctggctactccctgctgccaaccaccttcgtctcttgcctggattctccacatcagctcctaaatattctccctgctgccatattctcttccccatgtgctagtcccagcgcagcaggtgattgtgttaacactcaaaccaactgaacatatcaccccttcgctccaaagcctccaacacttcccatctcactcagagtaaaaggcaaagttctcagactgtcctacaaggcccacagaggggtgtgttggagccactcacacctgctcatgaatggcgctttctacattttcagaatgttgtcagcttgttgttaaacatagccattattaaagatgtaattacataaacttcaaattaaataaattaaaattatattaaaaatccatgcaataaacaccttaaactcattacttcctagttaatattttactattaacttgaggttacctatatctactgttgatgttgaaattactatgtaatggtgtacaactgtgtatctcttcccaaatccgtgttcagtgactcatgttgataacttcaaatcagccaaggtaagagtatttataccatagaaatcagcaaatactacaagacagggcacatgttaactgctatatgttgcaatttgctgtaatgaacaaatgaataggtgaggtgcccagttaaactgattaactgatgaacatattgcattacctacaatataatatgttgagtgaaataatgataaaatttttttgtaacacagaataaatgtgctaattatcttatagcaaagtacttaagagttggtgaacttaaaaaaatgaattgtaattttttttttaacaaaaaggtgatccaggctgggcatggtggctcatgcctgtaatcccaacactttgtttgggaggccaaggtcggtgaaatgcttgagcccagaagttcaaggccagcctgggcaacacagggagaagaccccatagctacaaaaaaataaaaaattggccagatgtagtggcatgtgcctgtactgcctgctactcaggaggctgaggtgagaagatcacttgagcctgggagttctaggctgcactgagccatggttgtgccactgcaatccagcctgggtgacagtgagattctgtctcaaaaaaaaagagtaagaataaataaaataaaataaatacactttttaaaaaaggtaattcaaatttattgaccctttaaatggccagtgactgtccttcgtatgctgatgagaatatattaacataacacgtcttgaaagaaatgacattttaacaataagaactgccttttaataataatttaaaaaaaactgatgaaagcattatcagaataactgttcagaggtatttccatcagtatgtggttttgctgtcaaaaatgatttatgttgaccaggcgcagtggctcacgcctataatcccagcattttgggaggccaaggcgggtggatcacttgaggtcaggagttcgagaccagcctggccaacagggtgaatcccagctactggggaggctgaggcagaagaattgcttgaacccaggaggcagagactgcagtgagccaagattgcactactgtactccagcctggagaaagaagcgagaagactccatctcaaaaagaagagaaaaaaaaaagtttaatttagaaacagacctgacttgctataacacacagtatccaatcaagattttcaaaaataataaaacatattcaatcctactgctttcactaaaatttaagaattgagtgatcacattattttaaagttttgtttcatcgttatttcaacctctaaaaaatatctatcagtaatatacacatgcataaaatttataagtaaatatacatatatattaggtacaggtctaaaaagtgttattgacaggcacttatgattttaaaaaaaaagaaaaaaacttgacagctgttgatcagagaggaccaatctaactgctttcgtggaccaagcaagtaagacaaatgagtgtaaagaaatgggtgtaggccgggtgctgtggctcacgcctgtaatcccaacactttgggaggccaaagcgggcggatcatgaggtcaggagttcaagaccagcctgaccaacatggtgaaaacccatctctactaaaaatacaaaaattagccaggtgtggtggcatgctcctgtaatcccagctactcgggaggctgaggcagaattgcctaaacctaggaggtggaggttgcagggagccgagatggtgccactgcactccagcctgggccacacagcaaaactcagtctcataaaaataaaaaaagaaataggtgtaagaaaaacgaggagccacaggcaggtgagcgcatgaaggccccatcatgggcctcaactacaggagcagccgccatgacgccccagacaggacctcagaggacctgatcttcatttgtattgcagctcaggtctttttgtgaaatcttgtgatttttagaagttgtcagtgcataggacaacactagagggcccaaaaatctctctgtaagccaactgaggtttgggcgctgctagtctgtaatcttctttatagattttcacacaggaaaaatactaaatttcattaagtaaatgatttcttgaaagtagaggtacctgaccattcatggttttaaagaacagtctgaatctgggaaggcaattcagaagataagtacatcctcaaggtatgagtagacgctgctaagatcagtggctccttcttagctgagcaagtgtgaaaatcttggccagttgctgacaccctaatcctctgactctacttgcaatcctcagtccaaacaaggcccaccgaaggaaaggaagtcctgaggtgaagtgcaagaatgggatgagtgtatcaacttcacacattaagtttttaaaagaaaaagaacagctgaaagtttaacgactgcttaggctggttcaaacgtccctatatgtcaggcacggttcctcacatctgtaatcccaacactttgggaggctaaggcgggcagatcgcttgagtccaggagttcgagaccagcctaagcaacatggcgaaactgcatctctataaaaattaccaaaaaaaattagccaggtgtggtgatgcgtgcctgtagtcccagctacccaggagacagaggcaggagggtcacctgggcccaagaggtggaggctaaaatgagctgagaccccaccattacactccaacctgggcgacagtgagaccctgtcttaaaaaattaaaaaagtccctataaaaatgaattttattgttctatttgaggtgactggcaagatgccaccatctgagatgggagatatgtaagggagaaaagacttcaaggagctagggagagacggtgagctttcctgggaaaagtttacctgaagtgtctgagggacaaacgggagatatgctggaaacaatgaaatatacaaacgcagacctcagcaagaaaggccaaggctggaatacagatgaggaaattaccagcctgcagatgctaagaaaagcctcaaaaccttgtgtgtgagacagaacgcctagggaaaataagaagagcaacagaggctagaccccgggacacttcaccattcatgcagagagagtggtgggagggtcttccgtgaggacagtggaggcaccagaaccatggagggcatggatgcagacaaagagaaggaggcaggtgccaccgtctttggtgactgtcagggcacgatgaaaaggctggttgatggcagcaagacagacgacaggagctgcaaatgagactttatgtgacagctgggagggaagtgtcattggtaagcaatgaaaatgttccctacacctgccctgtgccaaagcacagatgtggggaaatgagtgcctcaaagtctacaggaaaaggctaatgggagcactgtcctcagagaagactcagggcacagaagaggtgctctgtgtggtgggcagtgggggtaatgccagggtaatcttagaacagggactcctcagggcccgggaacacttcaggagggaggtagagagcggcactcacggacacagaaggcaaaccacatacagcactgtaaactttctagaagctacatcgttaaaaagtaaaaagagacagtaaaaatcaataactgtatttaacccagtaatccaaactaactgcatttcaagatgcaatcaacacaaacaattactgagctatctgacaccctttgttacaagtttttgaaagctgttgtgcactttacactgaacagcacgtctccattctgaccagtcatgcaccaggtgatcagcagccacttgtggtcaggggccactttacaggatggaagaggtagagagggaagatgggccaggagaaaaaaacagaatacagaacagtagaggaggaaagactgcagggtcctaagcttcagatattcagtgaaaatcagattaggaggcacagtgaaagtaataagcactaaagcatcacaaagaactggcagagccacacagaggctcatcgtggggcccgggacaggcatggtatatctaagtcagaaaagtgcccaggtcaccttctgatggctgggccatatctagggtggcagtgttaaaactggaaggtatttgaggtgtcttttagcccagtgccctcagttttacaaacggagagccaacgcccagaaagataaagtggtttccaaatggcctatgtgcaactgtacaggcagccctctcatcttgactttttatcccagagttgctctaagcatcttgatcattgtctgtaaaaatagaaaaaactgacttctagcacaaaagaaacatgtaagaagcgttaggagagctaagctgagggcagcattccgctaccacacaaaggtgaaactctcaccaagtcgatgccattattaccagctttttcttaccttgtgaaagaaggcagcacctgtcagcaccatggacagctcacaggagtagttggagttgtagagccaggactgatgggggatgtcccatgcgtggtaacggccagggaagcccacgatgcggtcccgagcttctctccacacccttgaaaaacacaagtgcatacacagacctgaatacagagctctagggtcatcagaagtgttcacagttattgcctccaccttacaagctctggcccttaggcttttacttctcgtatcctttcaaaataaaacaaaatcaacaacaagccaaacaggataaaagcaaataaggtatcatattcagcttccttaataagcacctgcacattgtccctctagcagtcagcatcctccagcccttccagaaagaataagccctaagtttggaaaggggatctccagaatggggtatgtacaatatctactaaggagggctccagaatggggtatatacaataatctactaagcagcagaaagatgatatcaatttcaattctttttttagcttatttaatttccaagaaagggcttggtgggatggctcatgcctgtaacctcagcacttgggaggccaacacaggaggattgcttgaagcaaggagctggagaccagcctgggcaacatagcaagatcctgtctctacaaaaaaaaatttttgtttgtaattagctgggtatggtggagcacacctgtactaccagctacttgggaggctgaggtggaaggactgcctgattctaggagttcaaggctgcagttagctatgattgcaccacctcccttggcctgagcaacagagcaagatctggctctaaaaatgaatgaatgaacaagcattttctaagaaaggctttgtttttaataagcatgacatattagttcagaaggacatgtatgtaatttacatatattgcacacttttcttttacagagaaggaacataataaaaaggtttagagagcactggtttaaccacagaagactactgaactgcaccactcctaattccaaatttgagcagggctgacggagaaacatgtatgatgagaagtggcctacagaaccatacaactgaaaggtttcattaaatggaagaaataaatggagacttcagtatgtttcagtagaaacttctatatcatctccaaatttataggtaaattagaacaaataaaattggtccccagtttcacaggataaattggagaactgaaagcgtttaagctccacaggacctgacaggcctgcagaaaggctgccagagatttaaactgcctgcaaactccctcatcacttacatggaacttcagttcctaagacacagaagattttatttcaacagagttcctctcctaataagtctagaagcatctaatctaatccaaaagaggagaaatcacaacttctatcacaatgtaacagccttctaggtgggtttttttagacaactgattttttttaaattgtggcaaaacaaacataaaatataccatcttaatcatttttaaatgtatggttcagtggcattacggacattcacagtgtcgtgcaaccatccctgccatccatctccagaactctttcatcttcccaaacggaaactctgtccccattaaacactaatccccactcccaccttcccacagcccggcagcccctattctactctccgtctctatgaatgactacctaggggcctcacataatggaaccacagtatttatccctctgagttgtttgcacttctgttacaaataacgctgctctggccatttgtgtattcctttctgtatggacacatgctctcaagtctcttggtataccttttctgtcccttatgattgattgtatctgcctctttcttggctacctaagttgaagtgagtcaagatctatctttgccagaagaaagaattcttagacttaccctttcctttgaacttaggtctgtttcattcccattaaggtgaaataagcaaattggggagattaataagagaaaggttttagatcaaaggatgcccaaatgcatgagaaaagggtcagggtaggaaaaggttaggatgtatagacagcaatgataattcaccagctccattaccagaggctaaatctcaaacatgaatgacagttaagagacacattaaaaggcttcccattattctctcaccacctgcaaatctgctggaaaatagcacgggcaaggtaagaagtccctaaatcaggggcttggaagctatgttaatgccagctatgttaataggcttcaaactccttaaagctgggctccttatcaaaatcattcttggatctaagggttggcagttctcctgttaacactccacgactatgctcaccacgccagtccttcggcacgctccaaactgcatcacgctgcagcataaacacactccctaccgcccacccccaccactaccacctgcagcagcaaagatcatgcctggagttactgcatggcttttttcctttcataaaaacaagtggagagagtcagctacttattatcgtgtaaaaaaaatacacctcggtttaccaggattttttttttaatcacagctgtcaacagacttggttcaataatacactaagcaagaggtcaaaggaaatgtgagaggctgggtgggggagaataagaacagatgttctaatttttcagaaatgtgtcaaatcattctttacagatggatttaagacagatgagcaataaagcctctgctccttttatctgagcatctgctcttacaagcctaagccaaaggcagctccagagccaggtaggtcaggttaggccttcagtgaacagaatggaagcacagagaaagaactctctctatcctggatccacacttaatttgaaaaagatcgccaaagaaatctactccagtgttttttttgttttgttttgttttgttttgttttagctctgttgcccaggctagaagtggcatgatcttggctcactgcaacctccacctcctgggttcaagcaattctcctgtctcagcctcctgagtagctgggattacaggcgcacgccaacacgccccgctaatttttatatttttagtaaaggcagggtttcaccatgttggccaggctggtctcaaactcctgacctcaggtgatccacctgccttggcctcccaaaatgctgggattacaggcgtaagccactacacccggcctccagtggttttcaaatgatgtggggaagaactaatttttccccaaaattattatagattaatactttggtaaaatacaacaaaaatgaactgcctggtttcttaaatatgacatccaaagcacaagcaaccaaagaaaatagatccactgaacttcaaaacacgaaccctgtgcttcaaataataccatcaagaaagcaagaaaataacccatggaatgggagaaaattgtgcaactccaatcactgataatggacttgcatctagaatatataaagaactcttataacgtgataataaaaagacaatcctggcctggtgcggtggctcatgcctgtaatcccagcactttgggaggccgaggcgggcagatcacctgaggtcaggagttcgagaccagcctgaccaacatggtgaaaccctgtctctactaaaaatacaaacattagccaggcatggtggcaggcgcctgtagtcccagctacttgggaggctgaggcaggagaatggcgtgaactcgggaggtggagcttgcagtgagccaagatcacaccactgcactccagcctgggtaacagagcgagactctgtgtcagaaaaaaaaaaaaaaagacgacaatccaaacaaaaatgggcaaagaatgtgaaaagccgtttctccaaagaagatatacaaaggctaactgatcaataagcgcatgaaaagaagctcaacatcattgagagaaatgcaaatcacaactgtacggccgggtgctgtggctcatgcctgtaatcccagcacttgggaggcttgctcgaggccaggagtttcagaccagcttgaacaataaagtgagaacccatctgtacaaaaaaaaaaaaaaaatgtaaagattagccaggtgtggtaatgtgagcctgtagtccccgctactcaggaggatcacttgagcccaggagttcaaggttaccacatgctaagattgcaccactgcactccagcctcagcaacaatgtgagaccccatctgtgtgtgtgtgtatatatacacacatacacacacacacacatttatatataaaattagttatcactttacaatgactaggacggctataaattttgaaaatggaaaataacaagcattgacgaagatgtggagaagctagaaccttcatacactgctggtgagaatgcaatatggggctgccaccgtgaaaaacagcctgaccggctcaaaatgttaaagcagctatcatgatccacccacattactcttaggtatccactcaagaggaatgacatgttcatacaaaaacttgcgcatgaaggttcacagcattattcataatagccaagaaatagaaatgacccaaatatccatcaacagaaaatgaatgaagaactggtacctgggctgggcaccgtggctcatgcctgtaatcccagcactctgggaggccgaggcgggcaggttgcctgagctcaggagttcaagatcagcctgggcaacatggtgaaaccccatctctactaaaatacaaaaaataaaattagcttggcatggtggtggtccatacctgtaatcccagctactcgggaggctgacatgaaagaatcgcttgaacctgggaggcagaggttgcaatgagctgagatcaagccactgcactccagcctgcgcaacagagtgagactccatctcaaaataaaaaagaactggtacctgctacaagatggatgaaccttgaaaacatcatgttccgtgaaagaagagagtcacaaaaggccatgcatcgttgtacagttctatttatagaagatgtccagaataggcaaatctatagagatgcaaagattgagtggctacctaggactgaggggtttggagaaaaattgggagtggctgttaataggtacagggtttctttcagtggtgatgaagatttctaaaattaaccatggtgatgtttgcacaactctgaatatactaaaaccactgaattgtacacttaaatgagtgaattttatggggtatgaattatattgaagaaatgttgcaaaaaaaagaactgcaagaaaaataatcatatacttggatttcatagtaaatgtcaaattgctttacaagtttctgaatgcttaccctcaatttttgtacttacctcaccattaacaggtaacaaactgtccctaaaccaacatcccagtccctgagatacctggagtagccttcatctactccatcctcttccctgcagtgaccctcaagtgggatccttcagcaattcctaagactcaagaaggcaggagagttgaaggccgggtgcaggttgggagtgtgacaaacctgcatttgaacccagagctctgctgccactttctagcttctacgtggttctgttctcttctatctcaatttactcctacatgaaatggagacagctacaatttatgtcatcaaattttagaaggatgaatgagataagacaaagtcctaggctagtccctggcacacagtacgggttcaacatatgtttaccatcatcatcatcatcatcattaccaccacctccttttcctcctccccttctttttccttttaaatcattgcttctgacaccctccttcccccaaatctttttgggtccaggatcctggcactgttccattgctccaacacacagcaacatgtcacttttgccttcccattcctctaaaaacaaaaccctcctatttcctttagagaactaccctacccgttgcctctactctctgcccatgtggtttggatttaaggatgatacacctgcagcaccaggaacaggcaggtaaccagggtctagccaatcaaagaattccaccttcctggccacagaggaaaggcctgtgggaacacagagcggagcctacagatgaagagagatggactcctccaacgccatctacgagcctgcatccagccacgtcctacatcagccctgactatctgcaaggggttctcagttaccatcagccaaaaaattcattttgcagcctaatccaggttttctgtcacttgcaacctaaagttttgattggaaattagtctctcaccggaacccaaacatgatttcgtcatggcggaggtgagcatcgtcatcaatggacaggatggcctctgtctcaatttcattccagggtaagaatcggttgttcaaactgttcttctcagtacggaccacctgtgatgaggaaggaaaaacattaaaaattaaggctgtgttatgaaaggccaaacaaaatctgtatttaggtccaaggagaccatggctggatttactgaataattttgcctgatctccgcgcttgtaaaatctagcatatgcctttcaggaataaaagctgccttatacttcaataaatgtatatagatttaccttttaagcttcattcattagttagctaattttcttgtgaatcaagcaaaagctgaagattattttatacacgcaataaacacgatgtagggaaattaaaaacaactctcccaagagaacacaaggtggcagagtggatctgagattccaatggctatggaattcccagcatgcttgttaattttaaaacccaactcagaaacctcatgagtctgtcacttctgactccccaattctaacgcctttttgggatataaatcccaaaaaagagcacagcccatctggtcgagattagttacttcacctttgaaattcctacctacaatgctgactactcgtacacaaactttttccttcttttcaaggtatcatgtactcaagtacaacagcttctgcgtcttcagcaaatcccaattcaaaacacatctaagtgattcaacatacatgcaaagcagtatttccttcataaaacagaaactggtgcttcaaatagtacaactacataatgaaacaatttttatttaaccatatctcagttaagtatagtttacctacagtgtgggtgagtagctgtgttattcaccttgccacctaatactcatataaatgatgaccacagccagtacttggatggctcattttattcttagagtgtctttgtctaattagtccaaccaaaggggaaccattattttgttctcaaaccccaaaaacaaagagcatctcatgaagaataatctttttagaatgccacgaaaaatcaccttacttccaacagactattttacttgtactgagaacaacctctacctggcatgatgaattaactgcatccgaggacttaaatttatgaatggtttccaaggagctctgtgacctactagcatgtctcttcaacttcaaataccttctcttccatcctccccctggaggtccagttcagatgcctcttgccacaccctccttgccaggagaatcatttattctatattcttaatgcagagccctcatacttcaattaattcattctagcacacttaaaatccaattaattcagagctagaagggctttggagactatagcgtctgtcactttacacatgcagaaactgaggcccagagtgatgtcatacaactggcaagttgcaagagccaaaactctaattcataactttaaaaaaaaaaaaaaagcgagttctcgaagtctcatcactatgttccccccaggcgtctcgaactcctgagctcaagagatcctcctatctcggctccgaaagtgcaaggattacaggcatgagccaccacacccggtcctaactcatactttgattccaaacccagtccttttcctgataaacttttgttaactttataaacttcttcaaaccaaagccaccatagaaaatgcttttttttttttttttttttttttttgagatggagtctcactctgtcacccaggctggagtgcagtcgcgcaatcttggctcactgcagcctctgccctctgagttcaagtgattctcctgcctcagcctcccaagtagctgggattacaggcgcctaccaccacgcctggctatttttttgcatttttagtagagacggggtttcaccatcttggccaggctggtcttgaaatcctgacctcatgatccgcccaccttggcctcccaaagtgctgggactacaggcacgagccactgcgcccagacattttttttttttttttttttttttttgagatagagtctcactgtggcccagactggaatgcagtggtgtgatctcggctcactacaacttccacctgccaggctcaagtgatcctcctgcctcagcctcccaagtagctggaactacaagcagataccaccatgcccagctaatttttttatctttgtagagacagggtttcaccatattgcctaggctggtctcgaactcctgatctcatggcatctgcctgcctcagcctctcaaagtgctgggattacaggcatgagtcaccacacctggcctgaaaatgcattattaatctgtgtaccatcaagaaaaaacaatgttgccaattaagaaggcatgtgaaattgatgatcccttgtttacttgattacagaacttaaatttttttttcttttaagagatggagtcttgagttgtcacctaggctggagtgcaatggtgctatcatagctcactgcagcctagagctcattagctcaagtgattgatcctcttgtctcagctccccaagtagctgggacctacaggcatgcaccaccacacttgggtaatttcaaaaaaaacttgtagagacacgttctggctatgtagccttgactggcctcaaactcctggtctcaagcattccccctccctcagccttccaaaaaaagtgacaggattacaggcaagagtcaacactcttggccagagctttctttaagacttcacctcagccccagaggaggtcctgcccaactcaagacaaagaaggatctgtaacagattcaccaccacagttaacagatgtccaagccaagcaacagaccgagaaatccaccttgccctgcagcatgtctgaccagcataaaaattcccaagtgtacagcccagggtatcctaagctcagagtccacaatgacaaaacgaaggaccgagtgaggcctaggtcagacgagagagcagcaaggagagcagatgccaagtgctcaccttagcagctgtcggttccactcgccaaagggcgggagggtggcaagaaggggccggacttgaatggcaagctcagcaatggtaagaggccatccattgtaagacacatctcaatttcagagatgacaaaatgtaaaataaggtccgccttggaaatgacggcatatggtagctgttcacaaactccctcaacaaactcccctcgaacattcactttacctaacacacctagcattcactcagtacagaactgattctgccaattcagccaaacaaagctccccctcacacagcttaaaatgaagaaaaaccacttcagttcttgaatattggcttgtagattatcagttttgtgggttaaccttcaggtggattatctacggcacaattagtaaaccaggaatatagcaaggagcttcagagttcaaagtgtgaggcgaagaccagcagcacacaccaccggagcctgtaggagtgcaggcacaccccaagcccactgagtcagaatctgcattttaacatgcccctgggggattcctgtgcacattaaatggggagaagcactggtacagagggagaaagcatggctttggggccaatcagaaaagcttgggttcaaattccaactcctcctcttactagacgtgtgaatgccagcaccctctctgctaaatcaacatagcaccacactgtttgcaaaatctgaagttacttatcagccaaacttgacaatcctataaacaacctaactctgcacctgaaaacgaaaaacaagaaaaactacaatgatttgatatctagatcatatccaaaattatctaatttacaaacaaccaaatcaagagaacctacttgtgctttagaagacttaggtggggtcatgcagctggaggtcaaatatcaaagtgttttggcctagatttcacactagttttttttagtaagtttattaaagtccattacttagatatcaagaagcaacaagagaacaactactaaggactccaggaacacagggcgcctgccatctctgctcaccctctgagcacaactgctctgggctggatgacaacagctgttcaggtatagcaaactgcattttaacaatcagaacagcaatcagaataaaagggccaggcatggtggctcacacctgtaatcccagcactttgggaggccaaggcgggtggatcacctgaggtcaggagttcaagaccagcctggctaatatggcaaaaccccatctctactaaaaataattttttaaaaatctagccaggcatgggggagggcacctgtaatcccagttactcaggaggctgaggcaggagaatcgcttgaacccaggaagtggaggttacagtgagccaagattgcaccactgcactccacgctgggcaagtgattccgtctcaaaaaaaaaaaaaaaaaaaaaagaaaagaaaagctgttaaagattcacagaaacacaacaccaagcactacagttttgtcagttagctgacaaaactaactgcagtcagtaagtcagctttaagaattcagagcagtggttctcaaccaggaacaattttgcctcgggctacatgtggcaatgtctgaagggatttttggttgtcacaactggagaaaagggtgcgctacttgcgtctagtatctagtgggcagaagccagggatgctgccagatcctatagtgcacaagacagcccccacaacagagaattatctgacccaaaatgtcactgtgccactgctgaaacaccctgatttagagtcaacctgcaggaagacagtaaaccaaaacagcacttggaagactaactatagttcattacctaagatgttccccttttccctatagccgcaaaaagatttctgccctcacaaactttgcaaacgccaactaaaactaaatgggtggaagagtaaaagttttcttctaacagttttgcttcaaagctgcagtgcttaatggctaaacaaaagctcagcaaaccaactattatccattctggcaccaaaatcagaagaacagaaaggctcaaacatttctaaatgcaggccgggcgcagtggctcacgcctgtaatcccagcactttaggaggccgaggcgggcggatcacaaggtcaagagatccagaccatcctggccaacatagtgaaacccagtttttactaaaaatacaaaaattagccgggcgtggtggtgtgcgcctgtaatcccagctactcaggaggctgaggcaggagaattgcttgagcccgggaggcagaggctgcagtgagccgagattgtgccactgcaccacagcctgggtgagagagcgagactccatctcggaaaaaaaaaaaaaaaaacacttctaaatgcagactcacagatcagcacggcctctaagaatctgagaaaagacagatcgaacataaaagaaacaagtcaaccagagggactgtgtcatatttaggaaaggttctcatttttgttgatgttgttttgtttcaaatcaaaccaacactcttccctcaaccccacaatactggctatttcttcatgttactacagcatattgctattagatgccttatgattacatcttagtaacttgcaaacaggaagactcactttcaagtgattgctttaattactggtatgacattaaccaaaatgaatagaccacagtgcctggcaatatagcagatgttcaacaaatgttttataaatgaatgaatgggcagaaaatagaacataatttagccctgccattctatttacagaatatgaaataaagacttgagaagtttctagatcaaaattataggtaaacattcaatatctttaataatcttaaagaatgatagagaggaattaggaaacctcttagtatttagtgtagttttctatagcaaaaaacccatccacctccatcaagccaggagcaatgcccactctttgcttggcctgtctcacacacagggctccctgacggtgcctcgctagctcttctgcacaatatcattcacgggacccttgaccttctcctatcacaaaggaaaagggacagcaatcgtggcctggaacctgccacctatgaaatttggccatttaaatacacttgaaatgccccttttcagattacatccggcccagccaagcccgacaatctccatcctccaacaaaacatatatacgtacataatacatccctatagcaaatccatatctgagaatgaaacttaacatcaagccatcacacaggcaagaaaggaaacagcaactgaccttagttctccatcatccccttcctccaacttaaaagaggaaccatcagagaactcaggaatgaggaaaatgagatccaggaagaggcacacagtcatgcccacccagctcaggaggacctaggtaacagagcttgaagtgagtggggagggaggtgagcgatgggagggaggtgagcgacagagagaagatgatagaaagaggactacatcatcatcatcattattattattgagatggagtcttgccctgtcacccagactagagtgcagtggcacgatctcggctcactgcaacctctgcctcctgggttcaaacgattctcctgcctcagcctcctgagtagctgggattacaggcgtccgccactgcacctggctaatttttgtatttttttttctttttttcttcttcttctttttttttttttaaagcagagacagggtttcaccatcttggccaggctggtctcaaactcctgacctcgcgatccacccatctcggcctcccaaagtgctgggattacaggcgtgagccaccacacccagccaaggactacattatttaagggattcattcaataaacgtcaagtgatggggcagaaagcaagaaaacgcaaaggaagaaaagagaataagaaggtaacagtgcattggttttccatttataactttacacagggatgtcatacagtacaaacaaaattgtacatgttttagatgagacaaatctgttttaacttataagagaaaaagttgccaatgatcccagtgcaagtgcaggtaagaaagcctaggttagcaggtcaacaaatgagagaatgcagataaagaccatccacagtgcctagcacacagaaaatgcccaaaaactgttaacaattattataacatgatattagcagtctctattttaattttcatacattttacatgtatatttcatattctgtatgtattttaatttttatacattttctatattttatacatatctttatttaaaaaaacaagtttgtgcttctccaagaaatttacacgtggaaaaaaaaaaagaaaaaaaatacatatctattgtcagaagtcctaagacctggtgctggtggtggctcacacctgtaatcccagtactttgggaggcagaaatgggcagatcacctgaggtcaggagttcgagaccagcctggccaccatggcaaaatcctgactctactaaaaatacaaaaattagccaggcgtggtggtatgcgcctgtagtcccagctacaaaagaggctgaggtacaagaatcacttaaacctgggaggtggagactgcactgagccaagatcacaccactgtgctccagcctgggcaacagcgtgagactctgtctcaaaaaaaaaaaaaaaaaaaaacagtcctgagccctcattctaatacaggtatcagttagtcaagtgacctgaagcaacagaattcttacagtctcagattccttactttgaattagtaaaaagagtacacatacactaagaggggaagacattacctcaagaatcaatttgctgcaattagtaaattatgcaacatgactttccagcaattgctttaaacttctgtatttcttagtattcatttttggttcggggtagccttgttttatataattttcctttgcagccatacagcccattcgcaaacagaaacccacagctatagccaccaagttattaagtaaaatgttgtcaaagagaaagaccaaccacccagatgtgccagctcctagtgaagtgcaccagaccttgcacagtcttggacctggagaagctggacaaggtttttcctgctggcttcacctagctatcacaattttaggaaattatcgtctcattcgttcaagggatatttttaaaagtagagtgggcagaaataaaaaaatacagcttaccaacactttaaggagtaagccctgagaatgatctccactctcttgcctgaggtctagccagaagccaagcctcttagcctgagaggcggagtccccagccagaaagttcctgacgccaagagtgcactacggatgcagcttctcttccagtcttcccttttccctaatagactactggggagaggatgaaaataactcccctggaatgatatttatattacccaaaaaaagaactctccctgttcaatttgaatatcaagggctgggacagagggaaaagggcattgaaaaataataatcttgtatctctcttttttttttttttttttttttagagacagggtctccctctatcacccaggctggagcgcggtggcacaatcacagctcactgcagccttgacttaccaggctcaagcaatcccctcacctcggcttcccaagagcctggattacagacatgcatgatgcctggctaattttttctatttttttgtagagatggggtctccctatgttgcccaggctggtctcaaacccctaggctcaagcagtccacccacctcagtctcccaaagtgctgggattacaggcgtgagccactgcgcccggcactatcattttcatttggaaaaaaaatggtgcattctgacctcatcacttccacagagaccttgcagtctgcaaggatgtgtgctatgctgatctctgaactggttctctctaccaccgctcctcgcctaggctactgcaagtctttttgcttctgctcttttccccatagttccataaaaatcatgtgcctcctctgctcaacaccctccaagggcatcctaaggcagacaggataaaacccagacttcctaaccacgacctgcactgtcctgcacctgctggtcccactgccttctccaacctccttcaaacgcgccacccggatgcactgggcatcgcttctggtgcttgccattccccatacatccctccagaatttacatggcctcctctctcgcttcattcaggcttctgctcaaatgtcaccccttctaaaagcccccttccaaggcaccctgcgtcaattagccataccctttatgaagaagagaatgaaaacctaagactcagggacgggctgccaagagactgtctcagcagtcagtgagtatacagtgtgaagggaagtgatgccttgagtgagctagactacactgttagtaaatgaaagatgtccctttcctaacagcccacatgttacaactccaaaaggacagactctaaaacagccaccctacttactattttccagagtataaagcagagtaaggaagatgtgtaaactggtcagaataaagtagtaactcaaaccaaaatttttaatgggactatctatcaagaagggattacttggcatttctgcctccagaagagttcagtaagcccctgccagacccagtcctccctcagatgacaactataacctctgcacaaaaataccaaaaaaagaatttccagaaggcactagagagtgaacaaaagacaaccaattatggaggggtgctaaaattcagagggagggaattactgacacagggagaattactgttgctttcaccctgagagtaggccagagttggtaccaagaaagacagctaaaactctcatacaaaacccatggtctttctggcctgtaaaggaaatgtgtaaggtaaccacagcctgtagaaagaatggagaaaattccagacaggagaaagccagagagagggagctccaagttctgcgtagaaactgctctgtctctggcccacccctaagccatgcatgcttggtgcaggctgtaagcagaccagctacatataaaagaactcaacatgagagtggccattcacgagacagggctttcagtctgagtcaatacagctaaccacctactaaaacaaaaatatcaacactttccagaataaaaatcaaagaaaaccatgctaaggcataccacagtcaaactgctgaaaaccaaatacaaagaaaaaatttcaaaagtagccagagaaaaccacaccttacatataaggaaacaaaaatttgaaaaccactgatatatcctcagaaacaacggaggcctggaaacagtggaacatctttcaggtgccatgaaagtggtggtccccaacatagtggagagtttttcaaaaggctagacctcaaatcccttggcataataatactctctagttggctttcattagatatctttgttgttatgctccaggagctaagggacctgatccatgtgtttacaaaatatacaagagcaagggagagagcagacactcaccatcgcccctctgtttggtagtcctaccccattcaacgggagacccacttcaactggtggcacttctcccatctctctgcaagtcctgtctccttgccccgccaccatcccatttgtgctgaagttctctttacacagagcatttcaatcaggagtgttcaagggtggtggcaataaagatcaccttcactctaagctagatctttttatgcaaataattatttaaaagaatgaggaattttaacatataagtcctatggggcacccctaagacaatccttctccacttaaaatagctggggctcaatacacttcacagcccacaaacacccagcacttatgcctgttgcttagtgggaacctaaacataagaggagcccgtattgcccagcactttctgaaatggcacggaggttcctgggtagattcactgatgcctgggaacaaccctggtgctaaatttataaaaattaaccttagcgtattgaattggctacgtctacatctagaagaaaaacccactctgaggtgtatcacagtagtgccctttttctatagcagagagagctaccagtctctttctagctctgatagctgggtacatccgagatgtcagcaacttcaactgttccccagaacacccgcctctcctagatagaaagcacaaccacaatatttacaggatggagtgaaattctccatctgaagctatttcctcttttttaaaaggaccagaaaaaaaacttgtattgctaatatgagaaagctgtttagaatagcctatctgtaaagtttctggcattttccaattaggtattattgcgatgggctgcccaatagtcaggactacttatttcccatcagagtttttaaaaaaagattcattctggtaagttcttgatgaatttcagtcaacttaactggtatggcaccagcttctctacatccctatcaaaatcaaagaaaactcaggaaaaatggaaaacaatggctgctctattattctactatttgaggagcatctatctttcacagagcaaatgctttcttaatttcaatgacataaagttgtaacagaaagaaaaaaagtgaactttgagaagtctattaaaaaaattccctatttacaaaacttaatatacaaaatacactgggataaaaaggatttataaccctacagtctttgaatagcttctaattataaattcaattaaatttaaaaaaagattagcagcagtaagaaaaaatttaaagcaaagaggcactttgcacagaaggaagtaggcagtaacaactatgacacaaacagaaatgatgtagagaggatacaagaagcctttatgagtgaagtcagttaaagctgcccagagcataggcaagacaaacatactggcttccatctcctttaacattaagggataagaaggaatcaaataagtgagcacctttctagaatccttagttgtcttatcgtagtttcctctttaatgctgagatcaaaaaagctaattatcaaagatcacgaaatgactacttaatcccaggtctgtatcactccaaatctcatacttattacaccatgctgctgcttagaaaaataattcaaatgaattggcctcccagtgaagtacattttttaaaaaccgagacttctagcaacgtgtggcccatcagactttttgctaccttctgccaggaagtaactacatatgcagcaggttaaataggtggcagtctgcttaagacctgctctaaggctgcacatttaagagagatggtcgccatctctctcctagaatgccaagtttaattctgaagatggtaaactcctcagaactaaagccctgtcctgcatatttagctattatttttcctgtaaaatacagcacttaaccatgagatggagtaaagaatgagaaagaacctacaagacaccctggaaggttcaattggagttggttctccaactccaaaatatcaaaccccaactccagtcttccaaaagacttctatgaatacctggaaaatgacacaggccttcctaaaccctttgggaggtgactaaagctgccgcttctggaatcagacatactaaagctcagcttctccattactcaccatgatcttgggcaaattcattaacctaagcttcagctcccatacgaataagctgaagaaacagcgataatatgtcacaaaatgcttattatagtgcctagaggctaagtgcttcctaaatggtagcttatcattatcatcatcatcttgttatgacatggaagtctacgggataaccgacaaggttttgtatattgaatataaaatcagtttcagttttggggatcctcgatttaggaagtgagtaacagccacagaactgccaaggcttgaaaaagcagcaagcaaacccttcaggaagaaaggaatctatacaggtttttcatgagtatgcatgtattctcctctgctagaagttacgattgctaaagtgaaggaagttggaaaagggattaagagtgaaatactatttcatgcaccaaaacgaactgttcgtttctctattaccatgatggggacgccaatgtcaggccacagaaggtcctctgatggcagcttgggagaattccacaccaccacgaccttgttcaggtaagggaggccattcagcctctctaaagagttcataagcacttcctcccgctcataagtcaacatcaccaccgtgaactgctctcggggaacattgcctccaagcgctgcctgaaattccttgccagaacccccagctccaccaccaataggccgaaagccagtccctgagcccaagaatttggcctctgagggcaacacagggtcaaagggagtgtgggggaaaagatggaaaggccctggagcacagttccagctgcggtaaaagtcagtgacagtcagagtgaaattgcggaggtatctgggtgaggcgtagggcggctccgtctccactggccccaggtccaggtccccgttgtcagccatgttggggtcagttccagccgccttgcctgaacggtgggggatctcagctgccgcctcttcccggatgggagcggctgggatctggatgcgagtcctaatcatagccagcacggtattaaaaatactgtcagcagtggagaagtaagtctcccagagaaagcggccttgccgcctcatagccaggaggtcactatcggagaggcttctgagcaggaaatgaacctcggtaacacgaggctttggcaccaccagggccgcctcgttccactgcagcatgtcctggtagggaagctggacctgctcccccagcaccaccgggacggcaccgacttccagggcttcgaagagccgtgttgcacacccagaggaaataaccaagcgagggtccccgggggtaatgatgagggcgaaggtggagagcttcagcaattccaagcggtcctcccgctctccacacagtgcccactcagttggcaggctgggtttgggctggtttttgcaggtgaattccaccaggacctgatccagcttgctgtcctgcaccgccttcagggtggcaatgatccggtcatcgtagtcggcgggagggtcgccctccatttcctcttcgaaggagcgggcctcctgaaggctagacctcagagactcaatcttctcgccctggaaggtgaagagatatttccgcttcaccggcacctgtggtgggatttccatgaagttgggctcagacatggcatggaccagcggtgatacgaccaagtcaaagccaggtctgtactggacagtgtagaaggtggactgggccaccatggcacggccagtactgacgttatagagaaggttctgtgtatctgacttacgtgacagattgatgatgacatggttgtgtccatccgtccgccagtgtggcagggaatacaactgcttctccagctcagcaggccgcagcaccaccggctcctgcatctctcccactagtatcacgtaaaggcaggcgatgtctgcattttctgtaacataaacgttagctcgtgctgtcgcctgaaaagcctgcttgaccaagggatccaggtagctgccaaagacaaactggtcactgtcatagacgtagaccgggaagccagaggtgagagggcaacgagaataatcaaagcagttgtgtagccggcagccccgagtggccttcgggggagggaggccggcatcgtccttctctgggagcagtcggatgggcagggacagcttgggctggttctgggccatgagctccttgtaggaatgctcggtctggctgatgacattcttgagctggagcaggtcctgcttggcgttctcaatgctcttcttacaggcttcgatcttcagattcagcttggcgatctcgctgttcagctcttggcgcttggcctccagctgcaggagctcttcactcaccgactcccggatgcggcacagatccagcacgtgcttcacctcgcacagctcgttccccacccggggaccaaaaatccgcttgcctgcctcatcagcctcatccagagtggtgaggtaatagtgggcgatgagcgggaagaagaccaggatgacaaagagcgtgaagctgagccacgtgaggcggatgcggttggaccagcgcagcatgcaggtctgacctccgttccccgcgcccccattccgcagcatggtatagcctgtcatgagtcctctgcagcctgccccccagatcacgtcgggtcactcgccataaccatgggttgctattccacaaaacgatctctgtttcactgacacgtttccagaagagttagtgtgctccccagacaaggcaccaaataaaatgaacatttcattttcctcagctgcagctgaaatggtctctgaccctattccagcagattttaagttctggctgttgaccaaagaacatgtccttaatctttatcaaacgataaaaggtgccacattcttgctgagatgaaagggaggaggtacctgatgatgaaacccaggaaaaacaccctggaatcagacagactttttcaaatgccatagctcttgtttcttggttttgctgaccaacaaatatgcatagtgtctattcacagttatacagtaataggttagaacagaaataaatgccagcttcttatgatgcctttgccaacaatcaggcctgcaaaagaaagagaaccatgtcagtcttgaagaagttatgttcaacacccctgccaccatacatttctagaaaatgcttaaatcttagatggaacaatggctggaacactggctgtgtctcaaagaacattataatgacaatgcagagatgttgtttgctgtttggtataggtcttttacttggggtaataaatggataagtgccccaaaaagctgcagtttacaacccctccccacttcttatttaactggatctagagcggcattatagccctgtaacacgatgaccaactaaattcatgggacaaagatgtccatggtcttttcttatcctgttccacacctgggcatcatctttagatgaacagaaataccttcctagccaacctgggtagtttatgtttattcctaacctataagtcttctttggaaatactttacaaaaaaagactctgaaaagctcaatttgttaaatgtagagttgaaagggttgaagagaactcttttgatctttatccagtagtagatgcagtaatcctgagacaaaatgtatttcccagtttgcttctcatttatcttccattagcagacatcatgtgctctttcttaaaatataaatagtaacttgctcttttagaaagaacactatacttagaaatgagaggcattcgttctccttctttgctgacagatttgctatcagaccttggtttcctaatcttctaaaatggagataggtgcacggagacggcaatgcaccacgttgctgtgatacaaagtgcagtggatgggaggacgcttgtagcgactcagtccctcagcaacactcccagccctgctctctcaccaagcttcactgccactggctgcagaggcttgccacttgctttccctcaaattcaacacagctagaaacaaatcataatattctatgccagggaatattcccggtttctttttttaattcttccaaaaaatattcaccatactcttaacagggctaagacatgctaagtataactgtgggagaatctagggtgtataatccttgacctcatggaacttcccttaccctaagagataagatataaacaaacaagggtacacgtagcataaaatgagtaggacttcacagaggcacaaccactttctctagcttctacctctgtcaaagatgtttaactattaaaggtgtaatagtcttctctcctttttaccatttttataaacataattttaattatgtttcagaataaagattcctttaaacattctaacattttttcaagtaacatttgatttcatcgtaacattggacattaaattttaatctgtcaataaattataataacaatttctaaagacaaggggatattaggctgggcatggtggctcacacctgtaatcccagcactttgagaggccgaggcgagcggatctcctgaggtcaggagtttgagaccagcctggccaacatggcaaaaccccatctctactaaaaatacaaaattagctgggtgtggtggcacgcaactgtaatcccagctactcaggaggctgaggcaggagaatcgcctgaacccgggaggtggaggttgcagtgagccgagatcgcaccattgcactccagcccaggcaacaagagtgaaataccatctcaaaaaaaaaaaaaaaaaaaagaaagaaagaaaagaggatattagaatcagctaacagcaaagaatgagaggagggaaatgatggtgtgagtcactttgtccattacaaagaacacctgacaagacatcagacctaaagttgatgataatattactaaaaggtttaagtatttggataatctaaacttggataattagcagctgaccaaatactcaaatttacattatccttgtgattcaaatgtttaaatctcttgctttcaaaagaatcttctttgcacttatgaccaaattgtaacaaagaaacaacagaatggaagaaaaagaaaagaaggcgtaatcacagcaatccagctgactcattccttcctcaccatgtgtttcaggacccttccttcctctgacttgtgtagcattacacctcagcacacgacttcttgaaagagtgaacctccagggcttgctctcctgatttaaaaaaaaaaacaaaaaacaaaaatagaacagtgacatactattagaaaaatactcaatactgaaagtgctattaaagaacctatttactgtcccctatgaaaagatttctcttatgtacatgaggtcaccaaataatttactgtccaaacagagactctttgaagtggaaagggagactattaataaatacactgggacaagaggtatacacggggactctggcaggcaaaccgtccagacagacgttacctatttatgtgctctaagggggaataaaaccaaacactaaaatatggaaaagtccttacttgttgaaagtatatactgagatatttacagatgaaatgatatacctggaatttgcttcaaaataaacaggatgagggtggcggggaatgtttgcgggtagaaatgaacccaagatcggccgtgagctgactgctgttgacactgaatgatgggtacccatgggggcttattatatcaggctctcttttgtctaagtttgaaatttttcataccaaaaattctaaaagatactacatacagagtctaaacagaggttattaaaaagtcatttggagactgactatagttagtctaatatttctagtgctaccaacttacatataagcagagctgagggcagaaacaaatgttctcacagaaaccaataattcaacaatgattcaaaagaatgcatccccactaaattcccatctcttttactggagccaggcaaaagcatcatccatgtccaatagcatgagcattccttcctaaacagctaattaaattatttcaagcacaaaagaaaaaggataccctcagaatctcttctgtcattctctggaaaatgacaataaacatatcagcctctagaaataaatgtcactgaaacaatgataaggagcccttcagattttttttattccatatacaatgtacatgtctaattcattctcagtcacctgccacagcatttcatgcttaacttgccagctggcctccattcctgcccctacaatgcactccatacacagcaaccaggaccatcttgaaacatgagtcaggccacgcctcccctctcaatattttcaaggctgcccactgtactgccgggctccccagacccatctcagttaccatcgctcttccccttgctctctcagcttcagccacactggcctcctcttacctcctcgactgtgccaagcttctcgctctcaaaactttatgcctgttttgtctgaaatgttcttccccaggcttctgcctggcagactctttctcatccttcaggcctcaactttcctggcattaccatttaaagttgcctttcttaccccccgatgctctctggcaccgacccactgatttacttcctaatatcttgtaatttattaattccctcccttccccaccaaagcctaatcctcgaggggaggaaccctttgtgtctggatcactgctgcgtggccagcacccagcccagtgtccagcacactgtaaacactctataaatatttgttaaataaatgaatcctatcactgatcacttcctcatcctacaaactctcaattctcccctggacttccatgaagctgtgtttttttagtgttccatctacttccctgactcatcctccctttctgctttgctgggacccagtcctcctacctcatactgaaagtgttccccatggctctcaacataatgttaatgaatccattaacaaataatatattgtattgaatacattataaactacagagagagaacttcagagccaggaggcagctggatggccatatggacctgcagctagactacccggctcaggatgcagctcagccttgagaatttgggaatgttacataatctccctgagctcatttcctcctttgtaaagtgagtctgaaaatctctacctaccgccagggttattgcacaaattaagtaagatattatagatggaagaaaaaaaaatgggaacatggctaaaacagtgctaagaggaaaatttatgcataaattcttgcattgaagaaaagtctcaaatcaataacctatgctcctccttcaagaacccagaaaaaaaacaaaacaaacctaaagagcagaaatcaacgaaatcgaaaacagaaaagcagaagagaaaaatcaagaaaacaaagaggtttgtcactggtttgaaaaacctacaagaatgacaaagaaaaaagggaaaagacacaaatttccaatagcaggaatgaaacaggggctatcaccacagtccctgcaggctacaaacaactctatacacttcagtgaaatagaccaactccttggaaaacacaaagtaccacaactcatccaatagggaataatctgaattagttttataactattaagtaaactgacttcatacttttgaaaatcccaaaaaagaaatctccagccccagatggttcactgaagaattctactgaacatttaaagaaaaataaacacctactctacactgtctcttccagaggaaggaacacttcccagttcattttataaacctagcattgccctgactaaagccagacaaagacagtaccaaaataaagaataccacaagccaggcgctgcggcttatgcctgtaatcacaccactccagaaggctgaggggagaggatgacttgagaccagccctggcaacacagtgagaccccatctctaccaaaaaaaaaaaaatttaaattagccaggcatggtcccagctactagaggctgaggtgggaggtgagatcacacctgggtgacagagcaagaccttgcctcaaaaaaaaaaaaaaaaaagaaagaaagaaaactacaaaaaaaaaatctctcatgaatatagacataaaaatacttaacacaatattagggtaatcctatccagaagcataaaaattctccccacttacaccttcatttctcctatcaaagtgtcttgcgttctcacccatgctgtgcacctcatattaagtcagtctgcattttacacttcctgcccatgtcctctcctgcttctctttctctgaccccttttcaccactccccaaatgtagctgttcctgcaggcttgtcctcaacctcttttctgccttcacctcccagagcttgccaatgagcttcgcttagccccctgattggctgactctcaaatttacttttcccatcttcacctccctcctgataatcctttttccagtggtcagcaacacagacatctacacctcagacgttcaatggcagcaagcacatcttctatgactagaacaggatcatgacagtgtcttctcccaggggaaaaaaaattaaaatagttgtatacagagatttatcattcagattgtggccagcattctaccttttactcttttccctaatcagacatttttgctgacaaatgcaaagcagaagtcgccatctgctagctcctcattggagggctgaaccaagcagtagccctggaaagctgtaatgtaatcactccattcgagagtctgagcggtgggctgagaagtcggggctcagagttccaatccagaactgtgcacgtgctggtgttccccttcaccttctcgcccctccacctccacgtaccagggccctcctcctctcacatcccttatcacaatagcaaactgcgattatctgcaggaacattactcacggccttgctttcaagagtttgttgatataacaaccatcctacagactcgacttttctccttgtaaaactaaaacactgatattgaaacttcccattgcggatctgggatatgtctctatttaggtcttcttttgcatcttttaataaaactgtaaatttttttatatgcagaaaattatcagactactccaaaagaaagaaaaaaagttaaactacactaaaacactcacccggagagacaggagagacaggaggcgcgacagggaagaagggagtcactgctccatctggctgttatgccttccacgtggaaggtatgaagggagaacagagtgagaaacagagagagaggctagacgctttccagatgttcccaatgaaaccttcaacggcctctaatatcttaaataattatgataatagctaacaggtattgaatgcttactgtatgccgggttaaacctattaccatatattcctcaacacactcacttaatcctcacagcaatcccgtgaagtgggtttactgttattcctgttctgtacacgaggaaaccaaagcacagaggctaatgagccatgggtcacccatgttatgtggtaaaacttgaattcaaaccaaagcaagctggctgtaaagctcatacctttaatgccttaattatgttacactgtctatattaattcaagtaagagtgcgagcaggcacacacacacatgcctatcatgtgtatcatttttacattctccatatcactgctactccgctgtaaccatgaataataattacaattgacacacataatattcctctaaaacccaaaaccaacactatattcaaagtatttacctgctaaagagaatagcagactcagaacaaaagatgtttgccactgtgcctatggcccacctgtatatctgtgcttgtagtactattttctctttttcatttaggtcaaaataggcccatcaagtggcagaactccatgacaacccaggtgcgggttctacagagctgtctgcatgctgctgtcattgctgccatcaccaggagcccttccaattaggtaaagagagttctccacaggaaaccatttcagtgaggtcactgaaagcagtatttcagaggattgttttgtttttaagtactaacaacccaaaaaaacatcatttcctgatttcctaactacaggcatgacaaacagcctgtcaaggcaagacagtacctagttcgtgaagtcaggaagtatgttaataagcactaaaacacatttcccaacactatcactgatttgtcttctgtttaaaaaaaaaaaaaaaaaaaaaaggcacttcccagggaaactaattgtagataaagagtaagctctaagaactacatgtagacacttcccaagttacaggagaccaaggccctatgtttttcacaatccaacgaccacagtggtttcttactgtgtaacctagcctggatgaaaaaagggaaacagaacatcctcagcaattaaaaagcaaaacgaagtgtgaaaaactggttgtgccttgacctactgactgaagagtgaagattatgatgcaaccagagaaccagagtttgagccgcccttattacagggctgtttgaaagggaaaacaatttattctttgggcttaagagtaggtttctaaatcccaaggtgttccacaaatgccactagcagacaaatcacaaaatacaaaaggaactcatcaataagtggtgagcattccttccgctgctgaatatatagatattaacaaggaaaatgaggctattgattactccaagttatctgtttacttggcaacaaacctgggcccagaagtctcaactcccaggataagtcctcaatttgaaaattatgccattgccttatctgcttcccttcccaccagttcgctaatgtcccacaaatccaaatcgtattgttttaccagtcagtttaattatgtgtaaaaatcagattcaccacttaagaattttttcaaataacaaaccgggaccgtgctacattaactaaatcagaattcctaggtgtgggggaaaactcctgcagtttgacaaagttcccaggtgattttaatgcagagcacacaaccctaactccaaaactattggtctaatgaagaattgatagtaatggagattcagattgatggcagctcaatcaacatagacagctaaggaagacaaacagcactatcccttagctaacgcagaaagtccgcacttcaatgcaccacatacccttggaagatggggaggagagggctttttcataattgctactgatttatatttacagtgtgctaggcacagtactctagataacacacttcacacatacatttcatcagccacatgggagtactgtcatttccacttcaccgatgaagcagtggtgtatcaccgaggataggaaacttgttcaaggcaatacagcaaccaagttacaaatccaggtccgtatgacctacagccctgtatactgcttcttgcttatctaccatttgtttacttagaggattcattttgtcttaattcattttacaatcattatgtattacttttgtaattaaaaatattaccttgttgcaatctttttaaagaacacctcattacatttttcaataaataatgtgacacatctatttgggaaaaaaaataaagtcagattactgcatgacaaaccaaatccaaaaataagttccaggtggattcaagagttaattataataaatgaaccgtaacaagaaaaggaaaatatacatgtaatttcatctcaagtacagccacttttccaggaatccaagcaaaagtaaaatccagaaatgttcaacaggtttgactatataagaatcaaatgattctatgtattcagaaggaaaaaaaaaaagcttaaatttgattaaaaatggggaagcctgctcaatatgacagaattaaaagaaagcaatcaacagtggtcaacggacataaataagaagttacacaaaaaaagggttcaagtgataaacatgtttatatgtttaaccttcctagcgatcaaagaaatacacatttcaaacaagatactgtgatattttccactaataaatcatcaaagtattgtaaaattataatatctggtgctaagcaggatccagggtaaacattcccacacttggctgctgggattgcaaattggcacacctttctggagcacaatttggcagtaataaaaacactgaaactgtgtctatcctctttccctgtaattctatccgagaaattattcttaaagaatcatgagtgagaaaaaagatttaacttccaaaatgctcatactaaaacattaaaatagtgattaaagtacagtacaactctgaactatgctggctgctacaatgtggcaggtactcttgtgttagtagaaaggtaaactgaaaagtaatttgccatttgtaagaaaaaaaccttcaaaattttcttatctctgattcagcaatttcactttctaggaatatattttaggtgagcaagatttgtatgtaaagatgcaatcacctcattattctttatcatctgtataaaatatataaattaaatgtccaagactaggagcaaggttaaacaaagtgtgactgtcactgatatgactatgataccattaggaagcttttcaatggttttaaataaaatgaaaacatgttcacaatgttagctggaaaaatacagattcaaagccatatatgcagtataacatgtttaaaatgcatatgtatatatttctgaatagaaaaacaaacagaagcaaaaacaccaacagaggcacttctagattgtgaaattataggtgatttctgcattcttcctatctttctcactctccctcctaaaatgagatgcgtcattttcataagggctgggtagcgatgtagaaacaaggttttcaaataaggtcttcagatggattttgctaacttattctcagaacagtcaacttagtatgcaagtgcctagaatataaactaatctaacggttttcgcttctcaaacatacatgatttttattttatgctgtggaggcatacaattgatatcgttagtgccctgggcctccctgaatgagatagagaaagtgaagcaagtttgctaagccatacataaatcaggtttttcctttttttttttttttaagagacagggtcttactataatgttgctcaagctggtcttgaactcctggactcaaggtgatcctctcacctccgcctcccaaagtgctgggattacaggtgtgagccaccgtgcccagccttaaatcagcttatgactcgggcattctccttcaccctttgtgggtgaattcagcttgagacgctttaccatcccatcatcattaccatatttctgattcatcaggtcccctaacttcccaattcctcgttcttgactcataagctccttgtcctttgttaactcgtaaattaaggggttagaccggatgacctcaaagatccttttagactctaggccctcactgacaattgccttgctcccaggaagcacaaaaacatgttttgctgtggggaaaatttcaccaccctacctactcaaggcagcaaggccattcccaagacctccttctcgtttcacctccaagatttcaggcataaggctttaaggccccccttaattttccacagactccattaataatttgggatcccatcaactattttctccattcgaagccactgtgcttttatattttacagctctacttcagaaacaaaggaagccggatgcggcggctcacgcctatatcccagcactttgggaggctgaggtgggtggaagttcaagaccagcctggccaacttggtgaaacccagtctctactgaaaatacaaaattagccgggtgtggtggcacacacctgtaatgccagctacttgggaggttgaggcaggagaattacttgaacctgggaggcggaagtttgcagtcacctgagatcatgccattgcactctagcctgggcgaaaagagcgagacgccgtctcaatagaaaaattgaaaaaaaaaagaaaaagaaaagaagccatgctggaaagagtaggtcaaaattgctgaaaaaacatttaaaagcaagttggaaaagagactttaaagggaaaatggtcaaaaaagcaaacatccaggacgttaaccattaatattattgaccagtccaaaaggtattggacacagccaaatgaaggaatataccaaaggaaaggcatgtgtgtgaggggtggcactctaaggcaggcacccgcaagcggcagctgcctgcttttgtagataaagtttcactggaatacagctttgctcattcagttatggattccgtttgtatggctgcgtatagtaggcattcttatatattatgtatatgatgctttcactctccaacagattctacagttcatcttcctatggctccacttctagacttttgatgggtcatttgggtgcatgtgagtagtatcctacactgcactttatggcctaactgtgggagagggaagtatgttagtaatgagtctccccaatcctcttctattttcaagatcacaggttttttaaatcctgcttctcttctccctagtaacatcacccaagaggtctgaatgactgaaaatttaaaaggactgtgcaactggttcaggcaagaaaagaaaagatgaagcttacaggtgagcccacctctgtccctcttgagctcacaaactctctctgcctgggctatgctatttccatgaaacctccaaacgtgaaaaatcctttcttccctctcagtcagctgccctatcattgaaagtcttcgaaatgatagttgccgaaatgaaggggtaacaaaaataaaatagaaatatgttaatagaagttttctgagctaaacttaataaccagcgaatggagtaggcagttttaggacgttatgaaacgtcctggtttcatattcctcgcctcactctagagtaacatacaaaggcgctcgaacctttaccaagagtaggtctgatgggacttcatttttctcctaacacctgagtctacatcagggaatccctcccaccctcctccagaagaccaccagtctcaactgagacaaggactccgcatcactcctgcagcccctcatcacccataaccctccaatccacagctggcctagggcctgcggaaaagaacaggtctctctctagtcttctgctggcttcaaaccaccctctggacttgccctctctcctagaaatacatttcccatgctcggcctggcccctgacttacttctctccaaactgttcccttaaaatctttttactccgaggtcaaaactcttgaggcctaatcactgaaagatcccaactacacaccaagtattaacagggttttcccccactagaaaagcgagaagtggagggatacagacatacgcctgtcaatcattttttaggtaggtatgcccctcacatctctggacattaagcacgtttccggaagtctgaagagccacaattctgactcttccagaaagcacttaggctcgattctctcttgctcgtgagttcttatgattcctccggctccccacaagcaaacgaatgggaaattcccacaggataaggtatttttaacacatcaaataacagtttaagaaaacggtttttctttcatcacaaaatatttcaaagtccctctgctaaatagcaagtcgctgagaaggcttcgcttcgctccagactctgtgccccgcagttactatcccagcacacaggtcacagcgatagtcactgtatcagaatgcaggactcactgccgaacaaaatacagaaaactgcagagtctgcatggctgcaacacacaaagcctttaaaaacaaaagaaagcacggggagctctgccagtaaaaatgaagctacctaaattggacaaagaataggacaaagtgacaagaaatgctaaagacgactcttaagtaaatcacatatgggggaaataatggacatgttgtggtgttctgcgcttcctcctccaccaaaggagtcgaaccaagaggacttgatgaagcttttagagtttttaaaaagggaagaaaaatccaggttgcggggaagggcgggggtggggtggtgcgggtggcgggggaggggcaaaatccacaaaatttaagtcttctgagagccaaacagattttattaataaaaggagccgaagctctcgctcaatgtggggaagagaaagcagcacccatcagcagccgggcagccctggctcgcctccgaggggctcggaataggtgctgtccccgtcgctgggctcggagctccgccgcgcacacacgccccgcgcacccctgtccggtccagcccgtgcagcgcgaggccggctctaggggagctgggcctgggagccagggtcctgcagcacctggaccctcggacaggaagcggctcctctgactgtggctcctgaaaggaggcgagcccggcaaaaagagccagcggggagggcagcaggcgactgcgtgtagaagcggggggcagatgtgggaaggtgtgctcgggaaggggtgggggtagtccggagctgcgcctccgccgacagaagatgctccgggccagcagccagagaaacgccgcgggtcacagagggtggagggcttcagggagcagaggaagcccaacagctgcagccgagcgtccaaaaaaaggtggaggcgggtcccgagcagcccaaactgggacgagagagggcgtgtgggggcggggagggggtgccccagcccagggacccgttagccctcccggctgccggccgagggcctggcggcctctccccgggcccccgagccaccgggcaggcctactccgctcggaggctgcatgcctcccgccgccgggcagcagcagcctccccggggcacggcggacccggtccctcccgccgcgtccccagcgctcggggccagccccggcaccctcccatgagcccttccgggcgcggcccccgctcctcgggctcacgcgcggccagcagtcctaccggcttccagctcagggacccgccgccgccgccgccgccgcctgcgcgaaagtcggcgtcccagaagccgttctggctgccggccgcccgccttccaggccgcgcctgatccgccgctccccctgccggccggcagccatttccgacaggcgactgcggaacttgccgaagggcgccgcgccggaaatggccgaagccggcgttcgcgagcgggggcgcggacgcgggcgcgcgctcgccactttcccgaccgcgtccgaagaccgccgaggcctcccgcagctccgcggtgacacccgggtcaggggcgcggggccgggcgccggggattgtgggaggcgcgggggggcgcgccggccgccttcggagccccccaactcgcgtcctgcaaaggccgccgggccctgtcgagaagacccgaccgcagatggcggggaggatgctcccggcggcgtgggaaccgggtctgactcccgagccaccgccgcttccgcaggggcgccggccccgggaaagtcaagtcataaatccctgaatctaaaactccattctcagagaaaaggcctccaaggacgggcgccgtgcgcggcaactgcctgcagttttgaagccctttgactatttcataacaaagacaaggccgggcggcttggacgcttaggaaaatcctggggctttgcaaaaacaacaggttaatctagtcgtgtgggatgatcaccaaaacaagacaggaaagaagaacaccgtgtcaatgctgaaaagccagcccctgtgagccccaaagtgcacgttttccacagtcccaaggaacacgtgactgtgtgtttccacacttgagaagtcaggataagaccccttggataatggaacaggggatgggggtgggagcaagcaccctacctggtcacctgcttaacttagaaaccagcttttaaaacctgtaactgcagtatgagctacgatcaaatttgtcttaacgtattttttttaatgtttttaatacccagaacacagggcttctactccagggtttcctcgccagggaaccccaaacacacaggacctggagaagccgggtagagctggctcctggccctgcgcttgggtggtcggctgccttaagaagaactgcaccccagagacaggctcgcagctgccgaccttatccactcgccctttctgctggagcccaggcccagtgctccagcaaggaggctgagaaaatgctgaagactgatgcccacgggggacagcttgggctaaggataacgtttgcaaaacaaacctttaaaaacccatagcaacctgtttcctagagcacactcttcatctctccacccccaaactagtcccgactcggatcctccttttcctatcctctttctcttgctctcccgtctcctattcacttttcctctcctttcctcttgattattataaacaaatgctttccaagtcttaccgccatcatatgtgtacatatgcaacccttactgttaccaatttgttgaagtcaagacaggaggaggcaaagtttaaaaatcagaagcattgcaggaaatgaaaatggagtgagtgttgcctgggtatcataatttttttttttttttaacagttcctctacttggctctcctccaaaggtacgcggccacagcaggcaggggcttggcagtgtgggaggagacaccacagaagacagggaagaactaccaggccttggttcatctccacactggcgagagaggacgtgcagttacctgctacctgttcgactcagtcttttacgttggagtaacaacacattgctgcccttaactttgacttacttgcttttaaagatgatgaagctggccaggcgccgtgactcatacctataatcccagcattttgggaggcccaggcaggtggatcacgaggtcagcagttcaagaccagcctggccaacatggtgaaaccctgtctctaccaaaaatacaaaaattagctgggcgtggtggcgcgtgcctataatcccagctactcaggaggctgaggcaggagaatcacttgaacccgggaggcagaggttgcagggagccgagatcgcaccactgcactccagcctgggcaatagagcaagtctccatctagggaacaacaacaacaaaaagattatgaagccttaggaagaacagggatattcacctgctgctgagcccccctccgctttgatcttgtgagtctgcactctcctgctcccctgtctgtctcctctagctcctgttccttctcctaccttgtgttctctgccaatgatatgactggggctactttcttttttccttctcacactctcttcttgctaatttcaaccaatttccctgcatcatctccacctgcaagctggtcctttacagcagagcttggggccctgctgcccagtagcactctggacaccctcacatcatcatcatcatcctatttttatttattttttggaaacagggtcttgctctgtcgcccacactggagtgtagtagtgcagtagtgcgatcacggctcactgcagccccgatgtccctgggctcagatgttcctcccgcctcagcctctggaataactgggaccatagatcccttccactgtgcctaatttttgttttttgtttttgtttttgttttgagacggagtctcactcttcttgcccaggctggagtgcagtggcatgatctcgactctctgcaaactctgcctcccgggttcaagtgatctcctgccccaccctcccgagtaactgggattacaggcacgcactactgtgcccagctaatttttgtatttttagtagagacagggtttcaccatgttggccaggctggtctcaaactcctgacctcaagtgatccgcccacctcggcctcccaaagtgctgggattacaggcatgagccaccacgcccggcctaatttttgttttgttttgtttttttgtagagacggggttgcaaccatgttgaccaggctggtctcaaattcctgagcttaagcaatcagcctgtcttggcctcccaaagtgctaggatacaggcgtgagccaccacgcggggccttcatcaccctattaatatatactttctgatacttaattgccaggcaataagctaaacccttttattcactgtctcactttaatccttacagggaagtatcggctgccagatagggagctgagacttcaagaagctaaataaggtgtccaacaccacagagcatggagcaaaggacacgggactgcaaatcttcctaactcgtgtgctcatctggctatctcaccagggccttaaatttaatatatcccaaactgaactcatctttaccccttcccactttgcactcctcaaatgtccttgtttaaaatagttacctttatctttcctaacccagaaactcaaaacctggcatcatctttgacttctctctttaccttcacattcaacagtttccaagacttaaaggctttatttgtaggatctctaccactgatcctctacagtttcacacctacatcccattctcgttcccaaatccccataactcctctcctggcccatcccttaacactgaaatcctggcttggaaaatatggtcacattcacagcagctgtccccaagaaggaagccaaggcaacagtatgcacaatgaagtgagtcttcactgatctctccatattttgacattttacagcacttattatctctactttgtattttgaaactgaatccaaaatagttttgcatttgttgtttaacagtcatgtatgtagttttttttttttttttctttttttttggagacagagtctggctctgtcacccaggctggagtgcagtggcgtgattttggctcactgcaacctccgccttctgggttcaagcagttctcgtgcctccctgagcagctgggaatacaagcatacaccaccatgcccagctaatttatttttagtagagatgggatttcaccatgttgcccaggctgatcttgaactcctgaggtcaggcaatctgcccacctcagcctcccaaagtgctgggattacaggcatcagccaccacacccagcccctccatgtgtgtagatatttatccacatccaaaaattaggaaaagcaggacgcattgaacctttggtacccagcagcaggagcctgtgggtcttctgtctggagcacaatcacaaggaccgagcatcagcagcatccactgtcctttcagctccaaattttaaactcccgtaagagagacattattggcccagcttgggtcgtgtgtccacccctttaatcaatcagctttggccaagcagcaggtcatcctggtccaaacatcacagttgggggcctcacttgtaaatagagcttgttcccaaaaaagagggaggcacacaccattcatttgtttattcattcattcaatcagcaaatagttgagcatctatagaaatatatttaaggttctattatgtacacaaaatgtataaaacatggccctgccctcacaccatgaaagttaccacataaaaagaagtcaccagataaaaaaagcataacagtattcataagtactcatgagtgaccatcaattcagttacacatgatggaagataattcattatacctagtataagccagtgacggtaaaaatagttagcagcaatgtgtacatgatcaacaaaagctcacagcagcaccatttacacaaaaacagaaaagtacccagatgtccatcagaggtagaccagataaaatataaaatataccaccacacaatggctaacacctgtaatcccagcactttgggaggctgaggccggcagatcacttgaggtcaggagtttgagaccagcctgatcaacatggtgaaaccctgtctctactaaaaatacaaaaattagccagttgtcatggcatgtgcctgtaatcccagctactcaggaggccgaggcaagagaatcgcttgaacctgggaggccaaggttgcagtgagccgagatcacaccactgcactccagcctgggtaaaaaagcgagattccatctcgaaaaaaaaaaagtgtatatgtatagtgtatgcatgcacagaatactttacagcaataagaatgagtgttctgcaaatatacacaatattgctgactctcccaatgttaaacaaaagcatccagacacacaacaatgtgtacagtatattattccattgatagaaagcttaaaaacaggcaaaattaattcacccttatggagtcttaagtaaggggaacaaaaggggccatctgggcagtgataatgctgtttcttgagctgggtgctgggttcacaggtgtgttcagtttgtcacattcatcaagcttacacttctcatacatcttcttttctatatgtatgtcatccttcaataaaaagtttttaaaaaataaataattgggcttgtgtggtgggctcacacctgtaatcctagcactttgggaggctgatgtgggagaagcacttgagtccaggagtttgaccagcctgggcaacacaggaagaccctgtctccacaaaaaatttttaaaagcctggcatggtggcacacttaggtgggtaaggtgggaggatcgcttgagccaggaggttgaggctgcagtgagccgtgatcgcaccactgcactccagcctgagtgacaaagtgagaccatgtcttaaaaaaataaaaataaataattggcactcaaagtaagacacctttaatctcccttgaacatcagcaccatgattatcctggagttgccaattattcccacactccccacctcctccccatcaccaccaccattatgcccccttcttagacacataagacactggagcctttggaaggagccactatatttaccgcatgacctccttccctctggtcccagcctactggacttcttacctggaattgtgggaacaggtcactgtaactaagtcacgtgacagagtgcttgatctattaatttacacatatttgcaagaaagaatttctgggcatgtgcacagtgataagctcagaaagctggtctgcagaaaacagaagcaaatagagtcagcatagagagggaaacaaacaaacccaccagagatggagaagcctcagaggctgttgacattgacctgtggtacccacatgtcccaggtgacactgggtgtccacgtgattgcttatgtagccttactatttaaaaaatcctcataatcccagcactttaggaggccgaggcgggtgtatcacaaggtcaggagttcaagaccagcctgaccaacatggtgaaaccccatctctactaaaaatacaaaaattagccaggcatggtggtgggtgcctgtaatcccagctactcgggaggctgaggcagagaatcacttgaacccaggaggcagaggttgcagtgagccaagatgccgccactgcactgtagcctgagtgacaagagcaaaactccgcctcaaaaaaaaaaaaaaaaatcctcatttacttaaactaacatgaatacgtttctgtctccggccaccaaacatgaccctgcatgttcttccctggaagaaactaagtagttattttgtttgtttgtttatttggagacagagtcttactctgccacccaggctgaagtgcagtggcgtgatctcagctcagttttggcaacctctgcctcctgggttcaagaaattctcctgcttcagcctcccgagtagctggattacaggcatgtgccaccacgcccagctagttttctgtatttttagtagaaatggggtttcgccaggttgcccagtctggtctcgaactcctgagctcaggcaacctgcctgctttggcctcccaaagtgctgggattacaggtgtgagccactgtgcccagccccttagttatttcagagccagactcttaagcactttgcatgtgtcatcccatgtgctcctttaacgaccctaaacaataaggaccattattagtcctttgtcacaaatgagaaaaatgaagcccagggaggttaactaatttgcctaaatcaccagcctagtaagtggtggtgccaggttttggaccctgacagtctaactccagagcctgaaactttaccagctgtgctccgctgtggtgcaagagaaatgctgaccatggcgatgtgaattgtctgctgcattagtagatttaacaaaggcatttgatttgttaaatgagttcaaatgtagaaatgatacaaaagatcggctgtctagagaagctggtgcacacatttctttcacaagggaattatcgtttgaggtatacaagccagagaaatgtaaactgcatagagtgtgacagatatgccaaacaagtctgtgttctcttaccaataaattagtttacagatttcagcaaatgctctcttgggggcccccactgattgcttatttttccccacgtgtttaatatccaggagaaggggatttgagtcccacagaaggagaaactggtgataacagttacttcaagtctcagagagggaggtgcctcattttccatgttaatggctgccagccccacaatccactcagcaagccttctagatcaatcccaaacaagccattggtgacccccagcaatcttcaaagggaattatcagtgaggttaagtcagataagaacttagtctatttgtaaggctttgattttaaaagaaagtgctgacagccactattcaagatcttttctatatataaatgactgagcaattttgtggcttataattagaacaatgcatgacaatttctagattgaggttccaaggttactcttctctttggtctatcagtgccaaaaagccaaaaggtcatcttctaaggctccagggatagcactcattaccctgataaatggctcactctagaagtcctggctttgatgttaccttttaaaagtggctggtttttgtctggccaaaggtggggccatttgggtggctcacagataatttgtggcaacactgagttaatatcagtttcaagacaaaacacattttattgttaagaaactatttgttaactcattacctcatgtcatagtattctctgccttgccatgtggctataaaaaaaaaaataaacattcaagtttcacattagaaagcttagcctgattcaaatctgttttctgtggctgggcactgtggctcatgcctataatcccagcacttttgggaggcagaggtggggggatcacctgaagtcaggagtttgagaccacactggccaacatggcaaaaacccacctctactgaaaatacaaaaattatcctggtgtggtggcgggcgcctgtaatcccagctacttaggagcctgaggcaggagaattgcttgaacctgggaggcggagggtgctgtgagccgagattatgccattgcactccagcctgggtgacagagcaagactccatctcaaaaaaaaaaaaaaaaaaatctgttatctgcataagacacctaacctgtaatgaccaattaagactcaaattagctagcgccaacagcgggtatcaaaatgccatcaaaattttctaagcttgcacctacaaatgttccctaaggcaagcataaaggcatctaacatttaccctaaattatgccagtgagtagcaaaaatgtgctcagttagacgcaacatgtcacaacatggtctgactgttggaagaacttagtgcagggagagctatacccagaggaaagaagtaaaattaggcagagtgttgatggctgagttccagtgtcacatttatatacagctcaatgactctagaattgtccttacaccaaaaaaaagttattcatagattcaaaaaatcaactgctcactactttcatttaaaaatgccttgtgtgaacaaggcgttccaactgaaaactggcagaattcatagaggttcttaaagaacatcaattagattcttagtcaaccaatttggctgtaaaatcaaaactgaaagtgcaatttccaaaactaattatgctaaatacttttaaatatatataacttgataataacatttggactttatgtatggaaagaaacagtagtttccaccacaggaattttcaaaagaaaaatatataggttttaaaccaatttatgaagatctgcaataagattttattgaagagaaagttttcccctattttcctaaatattactcaaaattaattctcaacccaaaaggtgacagcatgattctagtagggtccaagtcaatcccagaacacaataataattgatcccttccccaacccaagccttcagccttgcaaacactatgccatagatcaaaagtggaaccaaatgaaaatgtgaccatatttctacaaatccatcaatttggagggcaaaaaaccaacaatccaaagcccatctctaatggacagtgttagatatttcaccctcatgtcaaaagaaacatgtataattacatcatctaggttactaagaaaagcatatctttaaagtgaaggggtatttagaaaaaggatacttgacataaatgatgcaaatactcaaaaaatatattaaatatctgtgaaatgtgttaactatgaaagctttttaaaagcacatgctgagccttgtcttactttcgtgtacatttaaccaggcttcaataatgctctatttatctttatttcattaattaaataataaatatctaaatttttttattttttgagacagagtttcgctgttgccccccaggctggagtgcaacagtgtgatctcggcacaccacaacttctgcctcccgggttcaagtgattctcctgcctcagcctcccgagtagctgggattacaggctcgcgccaccacgcctggctaattttgtatttttagtagagatggggcttctccatgttggtcaggctggtctcgaactcccgacctcaggtgatccacccacctcagcctcccaaagtgctgggattacaggcgtgagccaccgtgcccggccaacatctacatattagtaggaacacaatagcaaaaaaaaaaaaaaaaaaaaaaatcacaaaaactgataaatatttaccaactctgtggcttccttccagctcatgagcataattttataaaattgctatctctatgtgtcaaccatttcaagtccttctttttcacttactttgaatgaagtattatgtttctacatgatcttcacagtcatcttgaaagttactggagcatcctatggtctagctcagtgattcctgaataacagtttattgaccaagctaggatgaagttttcatcagtccacagttaaatgcgaaaagcacagacaagtttgtgagtttttaacaaagctgaatgattcaattgaaaggattagactttattctgagattatgttattctcccttttttatgttaaaatgtgtttttatgaaatgaccatggtggtggtcaacggcagctttttctgtatctttctcactcaacaaaacactgaaatatactaattttggtatcccctacccagttattttttattttactggtctattaaacctaaaagtctggtaactataataccagtctagcctgtctaacaacacacatatatattaaggcatacacttccccccaacttcacccctgcaatacagaatgtttttggagactcccatggcagccagcctctgaaagggcccccaatgatccctgccccctggtattcacacagttgtgaagtctccacccacaccctaactaggatccatctgtgtggccaatggaacacagcaaaagtgaaggtatgtcactcccaggattaaacgacacaaggcatttcagcttccatcttggttgctttctccttcttagatcactctgggagaaactcactgccatgttgtgacaacactatggagacgcccaggtgagggactgaggcttcctgccaacagccacatgaataagattgggaacagatcctccagccccagtcaagccttcagatgactgcagtctcatgaaagaccctgtgccaaaaccacccagcttgatgaaataatctgtacaacaaacccccatgacacaagtttactacaacaaacctgcacatgtacccctgaacttaaaagttaaaacaaaaccaccaccaccaccaccaccacccagaaaaaacacccagctaagccacttctgaattcctaacctacagaaactatgaaataataaatatttgtattttcaaaattagctgggtgtggtgccatgtgcttataatcccagctacttgagaggctgaggcatgagaatcacttgaacctgagaggcagaggttgcagtgagccaagattgtgccactgcaatccagcctgggcagcagagcgagactctctcaaaaaaaagaaaaaagaaagaaagagagaagaaaaattaaaattaatgtgtagaatattttttaaattaaagttaaataaataaatatttgtactttcaaccatcaagtttgaggtaatttgttattgaccaatagataataaatacaacccttttatcctatttcagccacaaaatgagcatccctgtagccccccagggatgcaatgtggtgcaatgcagaaactgtatttatggctgagttggaagagagatcggatcagcaaagactgtgatctcctttaccctggctttagtttacatactctgacttttttcttctctgttgctttttctacttttcttgtattgaccagggtactcagtaaactgaataatccatctctagcaagggactcaatcctgcaagtttatatgcttaaaggaattactttatgtaaatatggtattttatgaaattttagaaaactggtaaatgtctattgacagaatccctaaccccagctgtccaaatctttgctagactcatccataccttaaaagaggagcatgtcttatatttcactaagaaaatagaagacaacagatatgaactctttgaaatgccttccttccacctttaaaactataagtattgaggtgaaaactattattttagtagatgctagagttcttagggatggaaaatgccttatttaggaaactactttgaaatgacatttgaagtatggaaaaagagagaatgacttagaataaaactctgaagcaaagagacagctagtcagatctatattttttaaaatccaaaaacatggggactggaggagaggaaatggaggtggataagaagagatggggctcaaataacagtgtgggaggctggagctgcgggagagagttcccagtgataggggagccggagaatgtttaaaatagagatatctattgtcggaattttaagttatttgtgttgctaaggatataaaatcccctaagccttcagtaatatctgtcacatgcacaaatgccttatgtgagtgatttgggggagaattacgaaaaaagattgcaaggggctgagctccacaactgggtcagcaaagaaccaagaaatgagaacagccacagaagttcagatacaagtaagataaagaatttaatggaagcagaaactcaaagccaaagaaaccataagaaggagagcttccaggaattcacagaaatcttggattgagtttcccaatggatgcagaatggggacttaagccaatgttacttaaatctcagaaaagaatgttgccttaagctgacagctgagtacatattcactgattcttctttcatctcttccggcccttgacaaagagatgtccttaactcctttctgaaactaggtgctccatttttgaatgtgatctaatatccttcctttaactcttgcttgatcagttattctctttgctacatacatggtcaataacctccttactatagcgttttacccccattctgcttataaacaggttcagtctcaggcctggggaaaataagagaataactcagctcaagctaccatcatcttacaacacgggctctgaacccagaaagatttagatttgaatccttgttccactatgtattcatggtggaacaccctgggcatattacataacctctctatactctctccactacaatttcctcatcagaacatggggataataacggtacctacccataggagtagtgtaaggattatcccagataatgcatgtaaattgttagtccagggcctggtatacagtaagccttcactaacatcaactgctgtcatcatcatcatttgcccaaattcttgagtcatctcaggctgggcacagtggctcatgcctgtaatcccaggactttaggaggccaaggtggacggatcacctgaggtcaggagttcgagaccagcctggccaacatggtgaaaccccgtctctactaaaaatacaaaaaaaattagccaggtgtggtggcaggcacctgtaatcccagctacttgggaggctgagacaggagaattgcttgaacctgggaggcagaggttgcagtgagccaagatcgtgccactgcactccagcctgggtgacaaaagcgaaactccgtctcaaaaaaaaaaaaaaaaaagtcatctcttctctactgtcattcactctttaatccctggggggctggctgctgtcaatttactgaaactgctctcattaagataaccagtgatcacttctaatatgaggttatagaaaaaacaaatgaaaacacaaaatgaaaaaaagaaccagcaacttcctaaattcgttatcccacttaatctttcaggcctttggaactcttctttagaatttaacagacctagtcactcaccttcttgaaatggtccagtctttgctttgcatggcattgcctctccccatcctttctcttttctttcattaagtcttaattctccaccatcccttaaatgcttgtgtgtctgggtctccacccttagccatctttttatcactaggtgaacacttctaagacttcagcagccaaatctctatctttagcccagaccttccttctgagctcttgagccaaactgtccactaaatttattgtctaaggttttcacagtcatccaaaccaaatttatagagactattaactaaatcattattttctctcccttccccaattctttcccttccctagtaatcattttctttttttcctttttgagatggagtctcgctctgttgcccaggctggagtgcagtggtgtgatctcggctcactgcaacctccacctcctgggttcaagcgattctcctgcctcagcctcccaagtagctgggattacaggcgcatgccgctgcacctggctaatttttgtattttaagtagaggcgaggtttcactgtcttggccaggctggttacgaactcctgacctcaagtgatccatccaccttggcctcccaaagtgctgggattacaggcgtgagccaccgcaaccagcccctactaatcattttctcaagtttccagcttggactggaatgtcattgttatagtctagccaggagtccaagctggaaacatcagttgttatccttatatctccctcacccagcatgtccaactggctatcagggcctgacagtcccacctcaaagtctcatggcttccccgagtcctgctccatcctacatgaccccactgtatttcagagtgggctttagagtcacatgggcctgggttcaaatattaactatgccataaacctactaatgactgtttttggtcaagtgacttaacctctctgacctcagctttttgtgataattaaatgagatatcatatgtaaaatagctggcacacagtaagcactcaacaaacattccgctgcatccccttcctttgggtctccattgctaccgggtggaatgcaatatctacctacttggtctatcttgtcctttctcctcctaattgccctagagttaatttttctaaaataaataaataaataaatctggtactatcatcgctggctttaaaaccttcaacattttcttttttcctgtggaatgaagtctcaattccttaacataagtggtaagttccagctgcctttctggtccctgctccccaagcccatttactccaaaacattggctttttgccagccacttcatgtacatacgggcttaatctccacacatgaagagccctttgactaattcccttccccacaccaagttctgtccaattggcaagaacctcaaggcccacttcaaaaactatcatataaagggtgatacctattcttaagtggttcaatttttttcttttcttttttttttttttgagagagagagaggatactgttatgttgctcaggctggtcttgaactcctgggctcaagtgatccacccccatgtcagcctcccaaaatgctgggattacaagtgtgagcctctgcacctggcctggttcaattttttaaaactattttttacatatacgcaaacataggccaggcaccgtggctcacgcctgtaatcccagcactttggaaggccaaggcaagcgaatcacttgatgtcaggagttagagaccaacctgaaaaacatggtgaaaccccatctctactagaaatacaaacattaactgggcatggtggcagtcacctgtaatcccagctactcaggaggctgaggcaggagaattgcttgaacccgggaggcggaggttgtaggtgaggcgagatggtgccactgcactccagcttgagtgacaagacaagactctgtctcaagaaaaaaaataaaaataaaaaataaataaaaatataaaatatgtatatatatacacacacacatacataatatacatatatacacacacacaaaggaagagagagagaaaaagtgctaaaatgtggatgtggcaaaacatcaaaaactggtgaatctgggtaaaaatttcaaatgtacaaaaaacttgcaaaatgccatataattctggcaacatttctgtaaatttgaaaatatttcaaaagaaaaaagaaaggacgggcagggtggtttgtgcctgtaatcccagccctttaggaagcggaggcaggaggatcacttgagcccaggagctcaagattacagtgagttatgatcctgccacttcactccagcctgtacaacagggccaaacaactagcctatgttttaaaaatgtcaatgtcgtcaaaaaaagcaagggcagaaggaaggaaaggaggaagagggagaaggggagggggagaggaaggaaaagggagacaggaagaaagaaggggaagctgaagaaacgttcaagattagagaagacaaacatgagagctaaatgcgatgtgtgatcctggattggatgttaaattggcattaaaaaaaactgctataaaatacattacttggctgggcatggtggctcacgcctgtaatcccagcactttgggaggccgaggtgggtggatcacgatgtcaggagttcaagaccagcctggccaacatggtgaaactccatctctacttaaaatataaaaattagctaggcgtggtggcacgtgcctgtaatcccagctactcaggaggctgaggcaggagaatcgcttgaacccaggagacagaagttgcagtgagctgtgactgtggcactgcactccagcctgggggacagagcaagactccatctcagaaaaaaaaaaacaacattattggaacaagtggtgaaatttgcaaattgactctttattatataatagcattataacaatgctaaatgtttttaaaagttattctgtagttatgtaagagaatggccttgtgctttaaaaaattcatgctaaaatatttaagggcaaaggatcatgatatgtgcaactttaaaatgtttcagataaatagtctgtgttcgtatgtgtgtctagagagagaaaaaatatagcaaaatgttaacaattgataaatctgtattaagatttaccacttttacaacttttctgcacgtttgaaatgttttcaaaattaacttttttaaaaaatattttttctgaggcagggtctcactctgttgcccaggctgcagtgcagtgccaaaatcacagctcactgcagcctcaaattcctcggttcaagtgaccctcttaccccagcctcccgagtagctgggactacagccatgtaccaccatacccagcaacattttttattttctatagaaacaggtcttgctgtgttgcccaagctggtctccaactcctatcctcaagcaatcctcccacctcagcctcccaaagtactgggattacaagggtgagccatcatgcatcgtgcccactgaaaataaaaaaatatttttacagaaccacctcagatagaaataatgccttctgaaaaccaaaaagcactgatgatagatagtacaaccactgtgaagagttttgaggttcctcaaaaaactaaaaatagaactaccatatgatccaccaatcccactgctgggtatatactcaaaagaaagaaaatcagtatatcaaaaaggtagctgcactcccatgtttaactgaggcactattcacaatagccaagatttggaagcaacctaagtgttcaccagtagacaaacagataaggaaaatgtggtgcatatacacaagggaggactattccgccatataaaaatgagaccctgtcacctgcagcaacatggatagaaacagaggtgattatgttaaatgaaattagccaggcacaaaaagacaaacttcacggtctcacgtatttgtgggagctaagaattaaaacaactgaattcatggagtagagagtagaacaacaatggttacctgaggctagaaagggcagcggtgggggaaaggggggatggttaatgggcacaaaaatatagttagaaacaatgaataagatctagtatttgatagcacaacagggtgactatagacagcaataatttttttttttttgagacggagtctcacactgtggcccaggctggagtgcagtggggcaatctcagctcactgcaagctccgcctcctgggttctcgccattctcctgcctcagcctcctgagtagctgggactacaggcgcgtgccactacgcctaattttttgtatttttagtagagacagggtttcaccatgttagccaggatggtctcgatctcctgaccttgtgatccacctgcctcggcctcccaaagtgctgggattacaggtgtgagctacctcacccggccaacagcaataatttattgtacattttaaaataactaaaagagtataattggattgtttgaaacataaaggataaatgtttgaggtgacagatatccccccaaaaaatcaatgaaagaaattacagacacaaataaatggaaaaatatcctttgttcattgaatggaaaaattaatgttgttaaaatgatcatattactaaagtgatctacagattccatgcaatccctatccaaattccaatgacatttttcataaaaatagaaaaaataatcctaaagtccatatgaaaacacaaaagaccctgaatagccaaaacaatcttgaatgaaaagaacacatcacgacctgatttcaaaatatactgcaaagctacagcaatcaaaatagcatggtactgctatgaaaacagacacatagaccaatggaacagaatagagagcccagaaataaatccacacatttatagtcaattgctcttccacaaaagtactgagaacatacaacgggaaaaagagagtcttttcaataaatggcactgggaaaactggatatccacattcaaaagaatgaaattagacctttatctcacacaatatacaaaaatgaattcaaagtagattaaagacttaaacacaaaacctgaagctgtaaaactactagaagaaaacacaggagaaaagcttcttgacattggtttgggcaatgattttttggatatgaccctaaaacacaggcaacaaaagcaaaaatagacaaatgggattgcatcagactaaaaagctgccgcagcctgggtgcagtgactcgtgcctgtaatcccagcactttgggaggccaaggtgggggcatcacttgaggtcaggagtttaggaccagcctggccaacatggtgaaacctcatctctactagaaatacaaaaaattagccaggcatggtggcacacgcctgtagtcccagctacttgggaggctgaggcaggagaatcgcttgatcctgggaagcagtggttgcagtgagccgagatcgcacaattgcactccagcctgggcaacagagcaagactccatctcaaaaaaataaaataaaaataaaaagctgctgcacagcaaaggaaacaatcaacagtgaagagacaacctacagaatgggagaaaatatttgcaaaccatacatctgataaggggttaatagccgaaatatataagaactcaactcaacagcaaggaaactaataacccaatttaaaaatgagcaaaggacctgaacagatatttctcaaaaaatatgcaaaaatggccaacaagtatatacatatacaaaaaaatgctcaacttcgctaatcattaggaaaatgcaaattaaaaccacaatgaaatatcatctcacacctgttagaatagccattatcaaaaagaaaacaaatgttgatgtagacgtaaaaaaaagcaaaccttatatattgttgttgtttgagacggagtttcgctcttgttgcccagactggagtgcaatagtgcaatctcagctcaccgcaacctccacctcccgggttcaagcgattctcctgcctcagcctcccgagtagctggaactgggactacaggcatgtgccaccacgcctggctaattttgtatttttagtagagacagggtttctccatgttggtcaggctggtctcgaattcccaacctctggtaatccgcctgcctcagcctcctaaagtgctgggattacaggcgtgagctaccatgcccagcctatattgttgataagaatgggacatggcacaatcattatggaaaaacagtatggagactcctcaaaaaattaaaaatagaactaccatatgacccagcaatcgcacgtctgtagtatttacccaaaggaaatgaaatcagcatgttaaagatatatctgcactctcttgttcattgcagtgctatttacaatagccaaaatatgaaatcaacccgagtgtctatcaagggatgcatgaattttatttattttttgagacagagtctcgctctgtcatccaggctggagtgcagtgacacaatctcagctcactgcaacctctgcctccagggttcaaatgattctcatgtttcagctacctgaatagctgggattacagacacgtgccaccatgcccagctaatttttttgctatttttagtagagacagggtttcacaatgttggccaggctggtctggaactcctgacctcaggtgatctgcctgcctcagccgcccaaagtgctgggattacaggcgtgagccagtgtgtctgtctgggatgcatgaatttttaaaattggaatactattcagccttataaaaaagaaggaaaattggcaaggcgcagtggctcacgcctgtatcccagcactgtgggaggccgaggtgggcggatcacaaggtcaggagtttgagaccagcctggccaacatggtgaaaccgtctctactaaaaatacaaaaattagccaggcatggtggtgggtgcctgtaatcccagctactcaggaggctgaggcaggagaatcgcttgaacccaggcggcggaggttgcagtgagctgagatcgtgtcaccgcactccagcctgggcgacagagtgagactttgtctcaaaaagaaggaaatcttatcatttgtaacaacaaggatgaacctagagacattatgctaagtgaaataagccaggcacagaaagacaaatactgcattgatctcacttatatgtagaatctaaataagtcaaactcataaaagtagagaatagaatggtggttgtgaggactgggggtatggggagatgttagtcaaagggtaccaagttgcagttaggatcaattagttccggagatctgctgtacagcatggtgactataattaatgtatatttataaattgctaagagattgatcttaaatgttctcaccacacacacacacaaataagtatgtgaggtgatggatgtgttaattcatttgatttaatcattttacaatgtgtacataaaacatcatgtcataccctgtaaatatacacaacttttatttatcagttacacactaataaagctgggataaagaaaagaagaaataaatagtatgctgttttttttttttttttttttgagacagagtctgtgttgcccaggctggagtgcaatggtgtgatcttggctcactgcaacctccacctcccaggttcaagtgattctcctgcctcagcctcggagtagctgggattacaggcacctgccatcatgcccagctaatttttgtatttttgtagagatggggcttcaccatgttggccaggctggtcttgaactcctgacctcaggtgatctgcccgccttggcctcccaaagtgctgggattataggcataagccaccgagcccggctgaggaattccttcttttttaaggcaatagtatttgtcttacaccggaaaaaaaaaaagcacaaatattaaattctagcttgcttttcaaaaaataaaaaagaactaatgctgcttggtttaagctgctgtaaatgtttttacttttactataaaaagcctggattgagttgtaattattggtttaagcatttgtcttattctattagactgacagcttcttgatgcaagaacttaaattgccttttggaattgaatagtgagacaagtatcctaattcagggcagtattattttcctggcatggcattattagagtactaatatgctacaatttaggatcatagtaaacaaggctggacattctttttttttttttttttaagaggtagggtcgggtcttgctttgtcactcaagctggaatgcagtggcatgatcatagctcactgcagccttgaactcctgggctcaagcgatcctcctgcatagatgggactacatgagtgcctcacgacacctagctatgtttagttttttgtagaaacagggtctccctgtgttgcccaggctgctcttgaatgcctgccctcaatgaatcctcccaccttggcctcccaaagtgctggaattataagcatgagccaccagactggacattcttttttttgagacagcatcttgctctgtcaccaggctggagtgtagtggcacgatcttggttcactgtaacctctgcctcccaggttcaagcgattctcccgccttagcctcccgagtagctgggactacaggcacgcgccaccacactcagataatttttgtatttttagtagagacgggatttcaccatgttagccaggatggtctcgatctcttgacctcgtgatctgcccgcctcagcctcccaaagtgctgggataacaggcgtgaaccggcatgcctggcctagactggacattcttaaaacgggaacaagaatagaaaatgaccctgtggtttggagcatagaacagtgctggcattaatctactcaatgtactgttctgtgtctttacagaaccttctgcaggcaagactggaaagtccacccctggtcccaggcagatgcacaaagaagctggtataagggagaggcctcatgaaagttggagctgaatttgccattgatgcctaggattgcaacccctggtatttgttttatcacttccactacacacagtgcaggagggcagcccatccttagttggccagaggttttactttaaaacccatgggctaagacaccaaacagttggaacatataggggaaatcatgctcttcccttctccccatgcttgttttgatcaagaagctaggaaactttctcttctccacagtattgaagcgatggcatctgtcttagtccatttgtgttgctacaaaggctgggtaattaatttataaagaaaaaaaggtttatttggctcgtggttctgcaggctgcacaaaaagcatgccaccagcatctgcatctggtgagggtctcaggctgctttcactcatgggggaagttgaaggggagccagcgtgtgcagagatcacatggagagagaaaaagcaaagagagaggggagaggggtgccaggctctttttaacaccagttctctcagaaactaatagagtgagaactcacccactccttctaccattaatctattcctaaatgatccacccccattacccaagcatctctcattaggcttcacctccaacattgggaatcgaatttcaacatgagatttggaggggacagacatccaaactatctcagcatccatccttctctctgcgtactctgctgacttactcttccttgtagaagaaaacaattcagtgtgtgatcgatgagactaggtgcagggtcactgcacactcaccactcaggctgcctttgaattcctcttttgtagatgtctgcccacaggccacgtgccttcttctctcctccattcagcagcagatacagcagtttccggcgactatgcctatgaccaaggtcaagttcaattcatggagaaagaaatgagaagcctgttttggccttggatccaagccaccttctccaggccagcttcagtagcaatcaagctgacattttaaacccagtctgattcctgtgactgtaccatttggttcaggactcaaaagagagaagaagatgaaggacctctcagaatcccaacagtattttactaatctttggatcccagcacctctcctggtgcttgttctattacaagccctcaataaattttgttgtcttgaactcagagtgtgcagcacacaggcagatagctgctcacagctattattggggtggttgtgtttttttttcgtaacagaacagagtgatttttgatgcttttctagtttgtcagagggctctgaggctatacagaagcagctttagtgaacagaggagagcgagctgtgtctttgtgcttcacaatgattgcaatgccagagagtgatgtcccaggggagctgtcaaacagcttgacagcaattctagcaagaagtggtagaaacacaattttgcaataatgatcatacgttttttgaaattttcctttatccttgaaatgccttgtgttgtcgaaaatctattcattactgttcagtcatctgtagcgagtcatccctttaggtctctgtactcggaagttacagccctgggagtattttggcagagagacaaaggctcctaggcacagtgggggagtcagaaaggtacaagtaaatagcggctccaaggagttagatttttaaaaaaataataaaaggacgggaagtgacaagaaatcatcttcctcaaagcggctttagttttctaaaagcaggcaccatagctctttgatatttttaccatgcacatctctggtgctttcattttctttttcctctaatcccttccatgcatttccttcattaattatcccttttctctccaggatgttcaacttctccctgtctctactgcctccttcacctcgacctataaacatgtacaagtttcttacatcctcagaaacttccagctaccctcaaatgctcactctcttcccttctctttgtagccaagagacgagcctattccagtgctacccaaagcatggtctgcagaccagcagcaccagcatcccagggaagccagatttgaaatgcagttctcacgctcacccagacctactgaatccgaatctctgtgggtggggtccaagaatctgtttcaacacactctccaggtgatgcttaggcacacgggggtctgagaagcactgcctctacttcctgtctctggtcaccactttgggcgatcttcctctgtccctttaaggtgtgcaccttccccagggctctgtcctgggccttggcttcattgcactcaatcatttccctacgtgatctcatccaccaaaggttgatttggttatttgtgtgttttaacataggtttataccagtgattctcaaatttatgtctctatcccagacctctttctctgagccctaagaatgtccagttgctttctggacttgtttaccaaaatgttgcacagttctctaaactatgtctaaaaccaacttagtatctcctaaacccactctgcatcaatgtcaataatctgggttgtgtgacagctttgccacccccttggcgcctgccaccctgggatccagctacacccactgcctttatgcttcccagttcactgactgaagtgcacaccacaaggtctggcctatagacaagagcaatcacagagctcttcaaggatgccagggcacccctcatatatttatttctcacattcttgatgaaatgtatgccttctagaccctcccagggtgggtgagtaggcctcaaatgacaattgcactgtaactgccagtcccttaagtctttgaatcccttcctccacattaaaccaagacatgtccaccatctccagttcactcacgtggaccacctttgagtctatgtttcagccagccaaccaaccaatcagattcaacacttccttttttcttctttttttttttttttttttgagatggagtctcactctgtcacccaggctggagagcagtggcatgatcttggctcactgcaacctccgcctcccaggttcaagcgattctccagcctcagcctcccaagcagctgggattacaggcgtgcaccaccgcacccagctaatttttgtatttttagtagagatggggtttcaccatgttggtcaggctggtctcgaactcctgacctcaagtgatctgaccgccttggcctcccaaagtgctgggattacaggcatgagctgccgcgcccagccagattcaacattttctaacgcccaaagctgcaacgctaaatggagaatccctgcttagtgagcccatgtcaaaacattcagccccatccaactttatgttccttccacctactgggtgaagtgtcagagccccagcatcagaaagtggtcagctcatgggtagtagggtagtaagaagaatttactgacaacagtataggttagaaaaagacagttttattagatagaagagtgtagctgggcactactgcaagagaggaccgagcgtgctgcagtggacttttccttaggggtatttatgaatcttaaagagggagcttaacggtaattggactatactgaccacagaggtcatgatacatgattacatttgtagacattttggtgccttgatgtcagcaagtgttgcacgatgagtttcgacatgcatgcattctggagatgtatagaaattctagttatttatacattttggagaaagcagcccataccagatgcctgctttagatcatagggaatctcttatttctaaatccctcagctgaggagtttggcctctggatggactgtttggtgcctctcccaggtgatctttgctctcctcaccaccattatcccacactcatagtatccattcccatacacattccctgaatttctgtctgtagaaatttaaaaagtcaagtagttcagtggagtgcagcacacctcttatgggccagtcacacagtgtacctcatcttcaggggctgctggactgaagtctaacaaagaggagtggtggggtgggtcctgaggagttcaacattgtgttgctcagcacctgcctcaggggaggccattactatttcctcaggcaatgcaggcttcatcctctcagaggtggaaagaccaataccactgagggttgggaatgccactgttgctggggttgttgggaagcaaaggtgggagtgctccttcactgataaaggagacatcagaatttaggggctcaatgtcctcagctttatcaaagttttcccaaacatccccatcccaacttgcaagatcccattctttcccaattaatgctctcactttaactgcacatagcctgcaaagctgtgagttcaacttgcgttgtaattcagccacttgcaggatgaggttctgcatttgactttcagcaatttccgcccttctgtacagtaaataaaggtctccctcagggcacacataaaagttcctaggtcatttttgtggtgcatgaactaggaatgtgaatccctgacctcatcctttccttccaccagcatgacattagggttccaaccagcatcattatattcattcattttccaaaatgttcgaaagtatcatatataagccaggcatggtggctcacacctgtaatcccagcattttgggaggccaaagtgggaggatcacttgagcccaggagtttgagaacagcctgggccacatggcaagacccttgtctctaaaaaaaaaaagctgggcaaagtggcacatacctgtagtcccagctactcaggaagctgatgtgggaggatcacttgagcctaagcagtcaaggctgcagtgagccatgattgtgctactgcactccagctggggtgacagagtaagactctacctcagaaaacaaacaaacaaacaaacaaaaggtatcatatataacattactgagctcattgattctatagttggttgattaggagtatccaacacagtattctgtgtatctctacaaacagctcacgttatggactattagcactctttttactactggaaatacagtcattagtgcctttaaatctaatcagattagagagccaattctagaaaccccagaaccagttcagaaaattcatccttaaaattctgctcctctagaagcactctcagtgccaaaatctatacaaagttttccagagaaacagaacaagaaggagatatctctatatatagatagacatagagatatctccagatatctccttctggtcctgtatatagatagatacagagagctagtctcatccacaaacactctcaaagacacaatgaaaaagagagagggattgattaattgtaaggaattgactcacacgattatggatagtaagtcccatgaccagcctttctgtaagccagagacccaggaaagctcatggtataattaagtctgcatccaaagtcctgagaaccagggaaccaacggtgtgtaaatcccagtctggagatgttccagctcaagcaggcaggcaggaaaccaaaacagggcaaactccttcttcctctgccttttgttctcttcaggccctccatcgatcagatgatgcctgctcacattagggaaggcaatctactttacagaatccaatgtcaatcttagccagaaacacccgcaaagacacatcaggaaataatgtttattctgggtatcccatggctagtcaagttgacagataaaattaaccatttcatgggcatatgactaaactgagcaaccacacagtgatgaaaatgcctgctaaaaggaagagtgtcatctatacagttttgaagttctctagaattctgcttactctattagtccattttcaggttgctgataaagacatacccaagactgggtaatttataaagaaagaggtttaatggactcacagttccatgtggctgaggaggcctcacaatcgtggtggaaggctaaaggcacatcttacatggccacaggcaagagcaaatgagagtttgtgcagggaaactcccctttataaaaccatcagatctctctatctcaagaactgcacagggaagacccaccccccgattcaattacctcccaccgggtccctcccatgacacgtgagaattgtggaagccacaattcaagatgagatttggatggggacacagccaaaccatatcggttacctttctaggttttaggtcaatttcaagatgcatacatcaccaccaagcaactacacagcaaatatactcagtccgtgattctgaaacatgggcatgcatcagagtcacctgggtggcttgttacaatgcagatttctagggtccacccctagagtttctgatttagtcggttttggatgggacctgagatttcctagtgctaacaaatccccaggtgatattgatgctgatcaaaggaatacactttgagaaccagtaaattcaagagtacaattgctacacctgacaatcttcacagccaagagaagctaatctgatctcccttaataaaaccatattattttttttctttctccccccgcccccccaccccgagaaggagtctcgctcggttgcccagactggagtgcagtggcacgatctcggctcactgcaagctccgcctcctggtttcatgccattctcctgcctcagcctcccgagtagctgggactataggtgcccaccaccatgcccggctaatttttttgtatttttagtagagacagggtttcaccatgttagccaggatggtctcgatctcctgacctcacgtgatccacccaccttggcctcccaaactgctgggattacaggcgtgcaccaaacgctcctggccagaaaaccatattctaaggaaagcaaacagttatcacaattacacacttcagcaacctccatctcctctttgctacttaagggatgaaaacatcaactgtgtatgtaaaagttaaatgttgggaaagcggaggaacataagtttttgttttgtttgtagagacagggttctcattatgttacccagccttgtctcaaactcctgggctcaagcactttacctgccttagcctcccaaatgagttctaacactttaaattctgttcatctctgaaaaaatcactgcaaggctgaattcaccgtacgataaagaaatcatgcccacaatgttatttttctagggttcccttttcctcacaaagtggtgccagtggaaagcagcatttcagtaactcctacctttatcctagtttagtgactgatgcattaacatggggtgagtttgattaaagggggcagccaacatttacaggtacaattaaaataggagctatgggctgggcatggaggctcatgcctgtaatcccagcactttgggaggcgaaagcaggtgaccacctgaggtcaggagttcaagaccagcctggccaacatggtgaaaccccatctctactaaaaacacaaaaattagccaggcatggtggcacacacctgtaatctcacctactccagaggttgaagcacaagaatcgcttgaactcaggaggcagaggttgccgaaatcttgagaggttgcggaggagagagtgagcagagatcgtgacactgcactccagcctaggcaacagagagagagtcggtctcaaaaaaaaaaaaaaaaaaaacaaaaaacaaaacataaaaataaaattaggccaggcacagtggctcatgcctgtaatcccagcactttgggaggccaaggtgggcatatcacctgaggtcaggagttcaagactagcctagccaacatggtgaaactccgtctctactaaaaatacaaaaaattagctgggcgtggtagcacacacctgtaatcccaactactggcgaggcagaggcaggagaatcgcttcaacccgggaggcggaggctgcagtgagccaagattgtgccactgcactccagcctaggtgacagagcaagactccgtctcaaaaaataaattaattaaaaaaaaaaaacagaagctatggtgctatcaggaaagggagtaaagatttgctctcattctattctctcctttatgtttcagacagttgaagggactacccaaataccaaaatgatattgaggaggaggcactttgtgatggctaattttatgtgtcagcttgattgggtcaggagtgtccaaacattgggtcagacgttattcaggtgtctggggatgacattaacattggaatcgagagactgagtaaagcctgctgtgcttgggcctcatccaaacagttgaagacctgactagaacaaaatggctgagtatgaaagaactcctgcctcactgttgagcatcacagttgacatcagctgtttcctgcctttagacttgaactgagacatcgcttcttccttctgacttgaactgagacatcacctcttccttcagacttgcacggacacatcagctcttcttgagtctcaagcctgctggttttcgaactagaatttacatcaccagcccttctgggtctccagccatccaactgcaaatcctgggacttgtcagccttcataattgtgtgagtcaattctatactaaatctttatacactcacatactctgttggatctgtttctctggcaatcccttaatacagaactggaccaaaaattccttctaaatcactgtttgctgccttaatttctacctcactaaaaattagcactattcctagcaacctgtctcaaagtcccccatctccccccaacctttttttttttttttttttttgagacagagtctcactctgctgcctaagctggagtgcagtggtgcaatctcagctcactgcaatctctgcctccctggctcaagcgatccttctgcctcagctccccaagtagctgggaccacaggcacacaacatcatgcccagctagtttttgtatttttggtcgagacggggttttgccatgttgcccaggttgctctcaaactcctgggctcaggtgatccacctgtatcagcctcccaaagtgctcagatcacaggcataagccactgcacccggcctcaaagtccctttaaaggacatctgcaacctggcatctcagtacaggtgattcagattcaatgactcagtggtgatttcagccctgttgtgccatcagccctgggagtgaagccaaggttgaggcttgctgaaagtggaacgcatgttcatttagacacccattgtaatattctgggtgatgctaatttttcttgcttaatatcagagaacagagaagttagagatgatatcaaaaatggaaacaacatgtacagtccccataatttgtgaattatggggacagattccatttctgtcttttgtcttgagcttctatgtgagctactacaaaaatgacagggctttctgccctccatttcccccttagtttgcacaacacacacaccccttctcaaacttctgaaagctctcagacatacttttgaaagtaaagaggctatagaggacatatcaatttatctaatagagtaatagcattatgcaggaaatggtaacttgaagagaagcatttgataggcatgaaagagcagcaaagctgcatagcattaacaccccactccactttaagtactgatgtaggtaactgctgcaataattatgccattaagaaagagtgttccaatggccttgatacatgctaccatcggaataaagttaggacattttccttatagttagtgcagtgcgaattgaagaagaccaagaaatgcttttcagagtaagagaggtaccataaagggcctcagagatttgcttctatcaggccaggcacagtgacttatgcctgtaatcccagtattttgggaggccaaggcaggtggatcacttaaggtcaagagtttgagaccagcctggccaacatggtgaaaccctgcctctactaaaaatacaaaaattagctgggcatggtggcacacacctgtagtcccagctactcaggaggctgaggcaggagaattgcttgaacccaggagacggaggttgcagtgagctgagatcatgccaatgcactccagcctgggcaacacagtaagactctgtctcaaaaaaaaaaaaaaaagagattctatcaaaggaggcaggggtatgctattggttactggtgcatattagatgcttgccagatgccaagcctaggtaaacttgtacactagccatgatatgagaagtatgttggggctgatgctggcttcaggagatctacatggtgtgagtctggatcaataaaatgtgaaaattaatggtagcttccatttagtgaataataacatcaatagttaacaactctgggctaggcacagtggctcacgcctgtaatctcagcattttgggaagccgaggcaggcagatcaactgaggtcacaagttcgagaccatcctggccaacatggggaaaccccgtctctactaaaaatacaaaaattagccaggcatggtggtgggcactgtggctgtaatcccagctactggtgaggctgaggcaggagaattgcttgaacctgggacgcggaggttgcagtgagccgagattgcaccactgcactccagcctgggtgacagagtgagactctgtctcaaaaaaaaaaaaaaaaaaaaaaaaagtaacaactctggaaagaaagtattctttgtcttttcttttttcttttcttttttttttttttttgagacaggacctcatattttgttggagtgcactggtgcaatcatacctcactgcagccttgaactcctgggctcgagcaatcctctcacgtcagcctcacaagtagctgccactacaagtgcatgccaccatgcccgaataattttttcagttttattttgtaaagacaatgtctcagcatcttgcccaggctggtcttgaactcctggactcaagagattctcccacctcaatcccccaaagtgctaggattacaggcgtgagtcactgagcttgcccaggctgcttttgaactcctagactaaagagattctgctgcctcaattccccaaagtgttgggatgacaggtgtgagccaccacgcccagccaagggaagaaaatattcttttttttttttttatactttaatttctagggtacatgtgcacaatgtgcaggtttgttacatatgtatacatgtgccatgttggtgtgctgcacccattaactcgtcatttacattaggtatatctcctaatgctgtccctcccccctccccccacaccaagggaagaaaatattcttaagtgacctgcccaaagtcatacagctaataagtggcagagacaagatctgaacctaagtgcttctgattccaaagcctgggcttaaacacaatttgattctgcttgccaaagcattacagctgagtaagctttaaggaaacctcaccaatcggaaccatgcaaaataaagaaatatcagaggcctgagctatcaagtccagtgaggagggtagccacttggccaagaggcccagtattgaacagaaatattcacagtaccttgaatgaaggaggggccaacagtgactcctggtccttgaccaaacttgagtcaggctcctctgaatgctcttcttgaccaggcctcatccttggcctgctgaatctggttctgcaagaatcccccacccttgttactttaccaagttccttgcattacttttccatccactggcccctgcaccttgtccattgtctacaaatccccagctgccactgttatattcagggttgagtcttgacccccaatgcaatagtcttgaaaaaagttttctttgcctacttaacttgttcagcgcaatttttctctgacaggtaaacaatgagggagctccattagcacaaccagagtctttcatccttgccgccccagaggatctggtgtctgggtcaacagactgaccagcacaggaagctcccacaccttcaagttgagtctgccagaggactctccaggttgcattgctgtggggacctttatgcaaggtaaggagacaaaccagggagtcgaaggcaggaggagaggactggaatacaattttaagaaaggagtggctggggctgggcgtggtggctcatgcctgtaatcccagcgctctgagaggccgaggcaggcagatcacctgaggtcaggagttcgagaccagcctggccaacatggtgaaaccccatctctactaataatacaaaattagctgggtgtggtggcatgtgcctgtaatcccagctactggggaggctgaggcacaagaatcacttgaacccaggaggcgggggttgtagtgagccaagatcacgccactgcactccagcctgggcgacagagtgaaactctgtctcaaataaaaaaaaagaaagaaaagaaaagagtggctgggcgtaagcacgcctatagtcccagcactttgggaggccaaggtgggaggattgcttaagtccaggagtttgagaccagcctgggcaacatagtgagactccatcaaaaaaaattagccaggcttggtggtacacgcccatggtcccagctattcaggaggctgaggcaggaggatcacttgagcccagttgtttgagaatgtaggaagccatgatcatgccactgcagtccagcctgggtgacagagtgagacattgtctaaaaacaaaaagaaagaaggaaggaaggaaaagaaaagaaaagaaaagagacagcaagaaagcaagaaagaaccttccggagtttaaactgatgcactgagtacctaagatctctctcatctcccattcaaggacccattgaaatgatgaaaaaggcattttgaaaaagagtgaaataataagaggcgcaaaaagaaaggctgccatcagcaggcaagaaatcttaaaaactcctggagggcagaaagcattaggatgagattgacaaagaagcagacaagaaaaccacagattcaaacgccaccaggaaggccagatcttgaaaagaagtccatggaagcttctaactggatgacgccagacagaaggcacagaagtgcaccatggcaatcattaggataattcattaaagctgggagagttgggactgccagtgtcttaaacacattcagcttttgccctccagctaaacatagaaaacctatccagaaaagaataaaaaagcgtacttggtaattaaggtatgattacagggcataagaaaaaaaatcagatggcaggactgccttccttagaatgtacacaagtaggacaggcacagtggctcatgcctgtaatcccagcactttgggaggttgagatggacggattgcccgagcccaggagtttgagccatgggcaacatggtgagaccgcatctctacaagaaatacaaaaattagcttggtgtggtgccatgtgcctgtagtcccaactacttgggaggctgaggtgggaggatcacttgagcccaggagattgaggctgtagtgagccatgaccacactccagccagggtgacagagcaagaccctgtctcaaaaaaaaaaaaaaaaaaaaagtaaacaagtgacgactgagcttgagatatgaaagtaaaggtggccagacgtggtggctcacgcctataaccccaggactttgggacgcctaggtgggtggatcacctgaggtcaggagtttgagaccagcctggctaacatggcaaaaccccgtctctactaaaaatacaaaaatgagtcaggcatggtggtggcaggcaactgtaatctcagctactcgggaggctgaggcatgagaatcactctaacctgggaggtggagcctgcagtgaactgatgtcacaccatcgcaccccagtctgggcgatagagtgagataccctctcaaaaaaaaaaaaaaaaaaaaaaaaaaaagtaaaggaaaactttcagaataaaaaggaaacagacaaaaataggtaaatgtgagagaaaaggctcaagggtgatagagtcaggtagtccaatattcctttcataggaattccaaaggagacaaagaaggaaggggaggaaatcatcaaagatatgagagaaaaagaccctgagctgaagaggaactcatcttcagattacaatgtccactgactgctgtacagagtgaattaaaaaagacctaatggtgttgcattcttgtgaaatttcagaacgctgggcaattttgaaagcttccggggggagatgtatataaaaaggaaaggaaagggaattaaactgccatcaaatttcatcaacaatactggttgctggaagacaatggaacaatatcttcaaatgcctggggaaaggaatatcttgaactctggattctataaagaatcatccgacacagttcaagaatcaatatgaaaaaaaatattgagacctgtcaaaactcacattgtttaccaccactcattccacgtgaaaaaagtactttaggtgtttgcttactcaaaatgaaaaaagaccccagaggccggatgcagtggctcacgtctgtgagccatgatcacgtcacttcactccagcctgggtgacacagcaagaccctgtctcaaacaaacaaacaaacaaacaaacaaagatggaaagaaagattctgtctctgcccatgcactcaccaagggaaggccacatgggcacacaatgacaggcagccacctgcaagccagggagagggtccctaccagaatgtgaccatgctggcaccctgatcccagacttccatcctccagaatggtgagaaaataaatgccggctgttgaagccacccagcctgctgtggtattttgttagggcagcccaagcagaccatgacagcccgccaaatccgggtctttctctctgctcattctgtaacccactgcctgtcaactgtgtcttcaccaatagtcattccgtcactggtgaagaaggtgtcacctggtcagggcccacgtgtattttcaaaagataaagagacagcaatgttttctcacttattttcttcctcttttcccaggagtctattcacttcgtaacgcctgtctaactgagcagccaaatttagcctgccgccagcaatggcagcctcctcagccctgccccagagaggaaaactgagagacaccagcctctgcctgaaactgtcttgctgaggggaggtttgagaacgctgtcttgtaaagtggaagagattaggggtttcaaagaatagtggtcttcaggccaggcacagtggctcacacctgtaattccagcactttgggaggctgaggtgggcggatcacttgaggtcaggagttcgagaccagcctggccaacatggtgaaacctcgtctctactaaaaatttaaaatttagctgggtgtggtggtgtgcacctgtaattctagctactcaggaggctgagacaggagaattgcttgaacccaggaggtggaggttgcggtgagccaagatcacgccactgtactctagcgtggcgacacagcgagacaccatcacaaataaaaataaaagaataatggtcttcaaatggaggtataagaacacttcctcttcagtacaagggcaccaacagtttgaaaggaattgatttccaggcccgcttttctgcaactgatctgcctgagcccttgcctgcgagggaggggcagggtcttactttccccagtagcccttttctactttataaaaagaagaggacaccccttacccatcctaatcttaccatggcatgtttcctggggcaccaaacccaatcctggtattagtgctgaaccaacatataaccacaaggactgagtaaaatttgcttttgcaaagtcaggggctttccaacatttttcctttccctcaagcctaaggagatctcattgaattgcatgtggatagagcattaaaaattatttttgacgataaatcagcatagggtttttggctcagaatgagctcaaagaattaactgatagtacggtaatacaattatttccatttctatctactttttaattttttggagacagggtttcactctgtcttccaggctagagtgcagtggcacaatcgtggttcactgcagcctcaaacaactgggcaatggtgcaatcgcagctcagctcactgcagcctggacctcctgggttcaaggagctcccacctcagcctccccagtagctgggaccacaggcacgtgccaccacgcctggctaatttttgtattttttagagacaggatttcaccatgttgcccaggctggtctcgaacccctggactctaattatccacccgccttggcctcccaaagtgctgggattacagacgtgaaccaccaagcctggctctactttttatacaaacaggtttcctctgcagtgtcatggagaaacagaattgattctagcagtgagtaggaaccaaacctagacacataaactaactggagaaaaaggccaactgtcccattaaggaagatatttctaacttaaatctaactccctatttaataggacttattcattggaaatacatattgttgttttggccaatttgtattactactactgatgacaacttcatcagaagaaatgattaaacgcttgttcaatggtcacaggaaataaaaatatcaatataggtctatactttttgtgcagtatgatagggtgaccagcaaaagactttcaaggataaaaatatatgtgaggaaaagctgtgtgggaagtggaatggaaattcaaatttagaaaaaaaaatgatataacatttcttatgtttcaaggagagcttgtccaggtattattttaatggatgatggcaggaatcaaacacgatgagattcctttgtataccatcaaaaaaaataataatgtaacaggtttctgtgcatgcgtaggttacactcatatatacacatacatctatacacatatttaaggacctattatttaccctctatagtttatataagtatatattttatattgtattatatatttatacttttcatatttaatattgtttatgtaatatgtgaaacaatatgtaatatatacatttatattttatcttttattttaattttttttttgagaaggagtttcactctgttgcccaggctggagtgcagtggcgcaaccttggctcactgcaacctctgcctcccgggttcaagcaattttcctgccttagcctcctgagtagctgggagtacaggtgcctgccaccacaaccagctaattttttttttgtatttttagtagaggcggggtttcaccatgttggccaggctggtctggaactcctgacctcaaatgatccacccacctcggcctcccaaagtgctgggattacaggcatgagccacctcacctggcctacatatataatttatataacatacagccttaatatcaatacatatgtatactatatatatatgtgtgtttatatacgccccaacatatatatattcatgttaaggctttatatttaggtatgtgtatttagatattttttattatgtatacatatacttatctattcatatgcatatatgcatttgtatttatgctaaagctttatataatacatatattgtgtgtatatgtgtgtgtgtatatatatatataaaacataaagctcatatacataaagcctcaacatgaatatgctctgattgtgatgagattatacagctgtatacaatgaccaaaattatcaaattatacacttcaaattggtagactttattgtatgtaaacaatagaaacaaacaatcacacctgtaatcccagcactttgggaggctgaggcgggcggatcacgaagtcaggagatcgagaccatcctggctaacacgatgaaaccccgtctctactaaaaatacaaaaaattagcctggcgtggtggcaggcacctgtagtcccagcgacttgggaggctgaggcagaagaatagcgtgaacccgggaggcggagcttgcagtgagcagagatcgcgccactgcactccagcctgggcaacagagcaagactctgtctcaaaaaaaaaaaaaaaaaagaaacgaacaaaagagaggaaaactttccccattaaaatagcaatagcaaaaaaaaaaaaaaaaaaaaaaaaaaagccaaaaatcggaatagagggctatttccttagcatgggataagtaagtaatattgtacgtgcctatgtgaggcacacagaatagtgagaatcaaaggcagagagtggagtgggagttgccgggggatggggaatggagagttagtatttagtgggtacagagtttcagttttacaagatgaaaagagttctagagaaggatagtggtgatggttgcacaagattatgaatgtatttaataccactgaactgtacacttaaaagtgattaagatgataaattgtgttatgtatattttaacacaataaaaattgggagtgtgtgtatgtgtatatatatatgtctgtgtgtacacacacacatatatataattgggagtgtgtgtgtatatacagtatgtgtatgtttgtatgagagcttaacgtacatacacttgtgtacatgtctacctaacaacttttttttttttttggagacaaggtctcactgctctgtcgcccgggctggagtgccgcagtgcaatcacagctcactgcagcctcaacctccctagctcaagcaatcctcccacctcagccttgtaagtagctggtactacaggtgtacaccactacactgggctaattttttaaattttctgtagtgatgaggtcttggtatgttacccaggctggtctcaaactcctggcctcaaccgatcttcctgccttggcctcccaaagcactgggattacaggcatgagccgctgtacccggcccaactttattttttaaactaagttgagtgtcaatattgacaatattctgtaaaacatatccttacaactatttaaacgtatagtaaaatgttgcatgtagattgtcaacatgcgagggggcatgcaattttacaaagttctttcaggggatattcaagccaaagagtgtgaaaacccctggacccccaggcagaattagacacaggggagactccagtacagtggcaactgagacaacaaagaaacactgaggacattttcactaccaggatataggcaaacgaaactgcaatgatgtcatgtttgcatatgtggcagatacaaaaagcttaaaagcagctctttgttctcttgctgagtttggggcaggcactggcacaaattgaggaaagtaagtgacaggaccggcagcaattagacttgctgatgttggggcgaccctggggttgcatctgggaaaccgacacccggatccaggatagaagctgacatagaagtaagcaaaactgctgtaggccccggtcaagggctctcctctcaggattcctcccataactacctgaaacaaggatttggaataccttgactttggagagagaaatcgaaatcagttcaactgaactctaatcaggcgtgagaatcctcttgtcattcaagtttaattggcttaatctcccaaatgatactgaaggcagtagtagttcttatgctcctagggtgcagtattatattatttataaatgcagacacttcaaaagcaataaaacacttggcccttgctctcaataaacttgccctctaactgggaggacagcatccaaatggaaaaaaaaaaaaatgaagaacagttcaaagcaacatataagaagtatgtaataatcccccaagagaaacaaagactgcattgcatactttcccagtagaagtacaaattggcacagcaccccatggagggaagtgggccacagagatcagaattacaaatgagtatctcctttgacctggtaatttaacttctgggaatttatccttcagccgtacttaggaaataacatatactctaagttactcactgtagcattgttcaaaataacaaaagattggaaagaaggcaaatatccttgagtagaagactgatgaaatacattgtgctacatacatacaatggaatatttcgaaggtataaaagtgcatgaggagggccgggtgcagtggctcatgcctataatcccagcactttgggaggctgaggtgggtggatcacttgaggttgggagttcaagacaagcctgaaaaacacaacacaaccccatctctactaaaaatacaaaaattagccaggcatggtggtgggcacctgtaatcccagctactcaggaggctgaggcagaagaatcacttgaacccaggaggcagaggttgcagtgagctgagattgtgccactgcactccagcctgggcgacagagcgagctcaaaaaaagagtgcatgaggaaactttcaaggtacagatatttttaaagtctccaagataagtgcgggggcagggggggaacagcaaggtacagaaaaggtgtataagacacttccttttgtttacaaggaagggaaaaaaagaatatagaatatatttttatgtgctttagtattcacaaataaagtctagatgaatacacacagaaatgaaaagctgattacctggagtggattagggagggtgaaaacagggtggatggggctgagcaggagggagacttctgctccatgaaccatgtgactgtgttcctactcaaaacaattaagagaataatgaaaaaatatcccctgctgaggcctgacataataagcaggaagttggtttctgagggacccccccacccaccgtccggtgtcaagcatatgccctcagctttggctggctctgaacagcagggaaaatgtgagagcaggaccacgtggcttctgcacgggcagccctgtgtccaggcccctgcccagctgctgagcttcctgcccggtgcccctgcatcagccagagtccaaccccaccctctcagcctgccctcttgccagcgggctcagaatcagctgtcctcaccagttaccagaatcctcaagcagctggctttaattgtgtctatgggaaggcagaaagaggaagggaaggtcgattaagtaaacctctattaagggaggagtgaagcccaggaggtcaaagagcccaggatagaagcaaggctagctgccaagccaagcttggaactctcccaaaagataccacagagaaatatgcccaaatgtgaatgctactggcttcaagttgtgtaataatgggtaggttttttccccccgggtctttatgctttgatgtgctttccaattttttttttaaataagcacagatgactcttacaaagcaaaaaaatagagtgtacaatgtgaaagatgtatacattaaaaataaaaaccaaaccatgattgttaccaaaccatgtagtccagaaaccttgaaggataaaaaaggaagctcagatggacagcataagaatgttacagctctaaacaaaattaaaatattacaataaaaaaaatgttcccataatgctgaagatgtcattggacagcaggtcagtggggcccacttagtcgggccaggcagagtggagctgtccaaggtgccagagtaagaaagggcagtggatgcagagatgactgcgttactcagtgcactggcaaggccaatagctcctccccagtcttcctcccactgagtttaaaactctctatccagcaattcaaaccactttcttccttatacttgctaaagtccataatgagactgggcacagtggctcatgtctataatttcagcactttgggaggccgaggcaggtggatcacctgaggtcaggagttcaagagcagcctggccaacatggcgaaacctccactttaccaaaaaatacaaaaaaaaattagctgggtgtggtggtggtggtgggcgcctgtagttccacctacttgggaggctgaggtggaagaatcacttgaacccagaggcagaggctgcagtgagccaagatcatgccactgcactccagccttggcaacagagtgagaccctgtctcaaaataaacaaaaaaaaagtaagagagagagagagtgtgaagaaagaaagaaagaaagaaagaaagaaagaaagaccaaccataataatggtcacattcatctcagaaacaacaaataattttttagtcttcatcaattttttttctcagctctttaggggttatgaaaggagtaagcaaatatttaaactatttgaggaggttttaggcatatttgaagctagcaaagtttcccaccatttaacacaaggctttacatgaagtcagtaaaattagatgcaaaatcaagcccctgaatacttgaaaaaatacagtagaccttgacgtgtgcaaggtatttatcccaaaacctttcctaatcccaaggttgggaacagccctatagcaaaaaacttccccctttattagtcaggactcttttgattataaattatagaaactcaaatgacacagaggggaatgaattggaggataaaatttaaaaaatagttgaacaggttgggcgcagtggctcatgcctataatcccagcactttgggaagctgagtcaggcagattacttgaggtcaggagtttaaaaccagcctgggcaacaatggtgaaatcctaaaaatacaaaaattagccgggtgtggtggctcacctgtaatcccagctactcaagaggctgaggcaggagaatcacttgaacctcccaggaggcagaggctgcagcgagccaagatcatgccactgcaccccagactggatgacgggagagaaatcttatctcaaaaaaaaaaaatggttgaacaaccttctgattgctcacagataataaattataaattataaatgaccagggtctagcatgccacagagaaaataagttttaatggcagttgcttccctgaaatggatttattgtctaaaaggcagaaggttctcaatgatcctgcatctggactcatcttgacaccacctgctctttctcacccacccatcatcaactaactcctattatttctaagccaataataggtctccaattagtcccttcctctctctcaactactgtccttgttcaggccgccatcatgaccaggttgaatcattctgtaaatagcagattgagaaatgtgatgcctgggcttgttagctaaatacctattaagaaagaatgatttaggccaggtgcagtagctcatgctacaatcctagtactttgggaggccgaggctggtggatcgcttgagcccaagagttcaagacaagcctaggaaacatagcaaaaccttgtcctctactaaaagtacaaaaaactagccaggtgtggtggcacacacctgtggtcccagctactccagaggctgaggtgggaagatcgcctaagcccagggaggtcaaagatgcagtgagctatgatcgtgccactgcactccagcctgtgcaacaggtgtgagacgctgtctcaaaaaaaaaaaaaaaaaaaaggaagatttttattctcaaggtatattaaagaagactaggaaaatcacaagagcatgggtttcagaatcagatcgttccggcttaaatgtagctctatcacttactctatggatgaccatggcaaagtattcaatctgagttgactttcttataaaataggcataataatatttgtcttgcagaattttttttctttcttctttttcttagacagagtgcctcactctgtcacctaggctggtcttgaattcctggactcaagtgatcctcccaccttggcctcccaaagtgctaggattacaggtgtgagccagcagggctggctttgtgaacttattatgaagattaaatcaggtggaagatttttaaagtgctcaaaatattgagagaatattcaatatatgctgctaatatcagaggcctcatgctaaccttacaaaagtcaataaacaaacacaaggtaaatgatgagggtcagaaaaatacatcggccttactcttctcaccttgctttgcctcccaaacaaaggtctgccaccattttatttctctaagcccaaaaggtttgactaaataatagttctctgtttgccttgttaggcagtgtttgatgtggcaccattacctgaagaatgaagtcaagagtcattcttggaagagggttagaatgtttgaatgttcaggtttgaatgtttgcagaattacaacaaaattggggtatgaaaaagaagatggggctccagaaagtcaaacatctaaagtgtttgttctatattattatatgatatagactgcaatgtggatataataatagaagatggtattagagatgatattacaatattgaacatggattcaacaataatatcttcctgaaagattttttttaaagctagactccccagcctgggcaacatagtaagaccccatctttacaaaatataaaaagttggctagaagtgatggtgagtagtcctagctactcaggtggccaaggtaggagaattgcttgagcccaagaggttgaggccgcagtgagctatgatgatgccactgtactccagcctgggcaacaaagcaagatcctgtctttaaaaaagcaaaacaaaaacaaacaaacaaacaaaaagaataaaaccattcagcacagagtaaactcaatgaaatcaacaaaatctcctaagaatctgaaagccatacaagtttctttttcaccttgtttaataattctcaaaaaccatgactggggaaaccaattctggtattaaaaataaatactgctttctccctttttagctaaactttataagactcagcatctcagaaagaccctcttatattctagagatatgctactgtcttcctagagagcatcagcaaacaactaacttaaaatgtaatcagtgaaaaaatataaaacatttccaaaagaaattttaacaagacccaaataaattgaaagacatcccatgttcatggattggaagacttaatattgttaggatgagaatactatccaaagctttatacagatccaatgcaatccctatcaaaatctcaagagcatcttttgcagaaatgaaaaatcccattctaaaattcataaagaattaagagactcaaaatagccaaaaataatcttgaaaaagaaaaacaaagttggagggctcacatgttctgatttcaaaacgtattacaaagctacagtaatcaaaaaagtgtaatcaaaacagcactaagtgtggtgctggcataaaaatagacatatcaaccaatggaataaaatttagaacccagaaataaacccaaatgtctctagtcaattgatttcagcaagagtgtcaaggccactcaatgggaaaaagagagtgttttcaacaaatggtgctgaaaaaactggatatccacatgcgaaatgaagttagacccttaccctataccatatataaaaactaacagtgaatcaaaagcctaaatttaagaggcagaactataaaactcttaaaagaaaacatggggcaaatctgcatggtcttagattaggcagtggtttcttaagtatgacacttaaaaagcacaggtaacaaaagaatatatagataaactaaactttttgaaaataaaaaacttgtatgcatcaatggacactatcaagagagtaaaaacacaatccacagaatgggagaaaatatgtataaatcatatatcctataagggtttgatgtccagaatacgtaaaaaactcctacaactgaacaacacaaaaacaatcccattttaaaatgtgcaaagggagggattagcaggaaggaagaaatgaataggatgagcacagaggatttttagggcagtaaaactattctatatgctactatcatgtggattcatgtcattatacactcatcaaaacttgcataccaacaccaagagtgacctctaacgtaaatatgcattctgggtgctaatgatatgtcaatttggttaatcaattgtattagatgtaccactctgatgagggatgttgaatgtgggtcagcctatgcatgtgtggaggtgagaggtatatgggaattctctactttctgctcagttttgctgttaacttaaaaactactctaaaaaataatacagtggggagaaaaagaggacaaagagcttgaacagacatttctccaaagaagatatacaaatgaccaataaacacaggaaaagatgctcaacattgctaatcattaaggaaatgcaaatgaaaaccataatgagatagcatttcacacctaagatggctatatatatatatatatggctatatataaatatatctatatattttttttgagacaggatctcactttgtcgtctgggctacagtgcagtggcacgatcatggcttactgcagcctccacctcctggggtcaagtgatcctcccacctcagcctcttgagtagctgagtccataggcatgcaccaccacagccagataatttttttttttgtagctatggggcctccctgtgttgcgcaggctggcctggaactcctgggctcaagcaatcctcccaccttggcctccaaaaatgctgggtttacaggcatgagccacaacaccaggctataatttttttttaaaggaaaatagcaaatgtggaagaggatgtggaaaaatgggaacccttggacattgctggtgggaatgtagcgacgcaaccactgtggaaaacagcttggcagttcctcaagaagttaaacatagaattaccatatgatccagcaacttcactcctatgaaaacacccagaagaagtaaaaaggactcaggcaaatacttgcataccaatgttcattgaggtattattcaccagagccaaaagctagaaacaactgaaatgcccaacatgggaagaaacaaaacgtggttcagtatacatacacacacacacacacacacacagacacacacacacacacacacaatggaatattattcagccgtcaaaattaagctctgatgcatgctacaatatggatggaccttgaagacatgctaaatgaaagaggctagacacaaaaggaccatactgtatgattccacatataggaagagacgcaaattcgtagatacagaagtctaatggtagttgccagaagctgggaggagaaaggaattgggagttattaaccttggttaatgggaagagagttttgtcagagtagtgatgcttgcacagattatgaatgtaatgaatgccactgagttatacacaaaagtggcttaagtgggaaattttatgttatatgtatttcaacacattttttaagagaaaagtaatatgtgcaaaatgacctatgaatacaggaattagagactgttgctggtcaggcatggtggctcatgcttataatcccagcactttggaaggctgaggcaggaggatcacttgagcccaggagtttgagattagcctgggcaacataaggagagcatgtctctacaaaaaataaaaaattagccgggtgtggtggcatatgcctgtagtactagttattctggaacctgaggcgggaagatttcctgagcctaggagttcgaggctgcagtgagtcatgatagtgccactgcactccagcgttggggacaaagttagaccctgtctttgaaaaaaacagaagaaactgttctga

SEQ ID NO: 274 - DNA, 210 bp, Homo sapiens
ttccttggatttgtccaaatccaaacccccatttctgtactttgctttctgtcttcaggtgatcaggatgcccttctctcatctgtctacctacagcctggtttgggtcatggcagcagtggtgctgtgcacagcacaaggtaaagaaactcaattcccctgcttggagcccagcaaacacaatttctggggtgaagacatttagccaga

SEQ ID NO: 275 - DNA, 231 bp, Homo sapiens
actggtgggctggagtcccagggggagattattccaagtaggggctccagaaagtggccagatggtgtgagtggctccagaagactcttctcttctctgtgcaagagccaggaaggctctagaaaggaatgtctgaggaagcatcggagactgggtcccgccatgcctgtgtcatctcctggcttccccggcccttatggctcgttcggaacaccacctggatacggctgc

SEQ ID NO: 276 - DNA, 719 bp, Homo sapiens
aagatgggattcttcaaacgggcgaagcaccccgaggccaccgtgccccagtaccatgcggtgaagattcctcgggaagaccgacagcagttcaaggaggagaagacgggcaccatcctgaggaacaactggggcagcccccggcgggagggcccggatgcacaccccatcctggctgctgacgggcatcccgagctgggccccgatgggcatccagggccaggcaccgcctaggttcccatgtcccagcctgcgctgtggctgccctccatcccttccccagagatggctccttgggatgaagagggtagagtgggctgctggtgtcacatcaagaatttggcaggatcggcttcctcaggggcacagacctctcccacccacaagaactcctcccacccaacttccccttagagtgctgtgagatgagagtgggtaaatcagggacagggccatggggtagggtgagaagggcaggggtgtcctgatgcaaaggtggggagaaggatcctaatcccttcctctcccattcaccctgtgtaacaggaccccaaggacctgcctccccggaagtgccttaacctagagggtcggggaggaggttgtgtcactgactcaaggctgctccttctctagtttcccctctcatctgaccttagtttgctgccatcagtctagtggtttcgtggtttcgtctatttattaaaaaatcggaaccc

SEQ ID NO: 277 - DNA, 1459 bp, Homo sapiens
ccgagcttcttaaacacaggccttgggctacggctctgggggtacttgggggggcgggggcaggtctgatgagtaacccctccccccaggttccagaggaagaagcctccacatctgtctgccggcccaagagttccatggcctccacttcccgccgccaacgccgagaacgtcgctttcgtcgttacttgtctgcaggacggctggtccgggcccaggccctcctccagcgacacccaggcctcgatgtagatgctgggcagcccccaccactgcaccgggcctgtgcccgccacgatgcccctgccctgtgcctgctgcttcggctcggggctgaccctgcccaccaggaccgccatggggacacggcactgcatgctgctgcccgccagggcccagatgcctacaccgatttcttcctcccgctgctaagccgctgtccctctgccatgggaataaagaataaggatggggagacccctggccaaattttgggctggggacccccctgggattctgctgaagaggaggaagaagatgatgcctccaaggagcgggaatggagacagaagctccagggtgagctggaggacgagtggcaggaagtcatggggaggtttgaaggtgatgcctcccatgaaacccaggaacctgagtccttctcagcctggtcagatcgcctggcccgggaacatgcccagaagtgccagcagcagcagcgagaagcagagggatcctgtcgacccccacgtgctgagggctccagccagagctggcgacacgaggaggaggagcagcggctcttcagggagcgagcccgggccaaggaggaagagctgcgtgagagccgagccaggagggcgcaggaggctctaggggaccgagaacccaagccaaccagggccgggcccagggaagagcaccccagaggagcggggaggggcagcctctggcgatttggtgatgtgccctggccctgccctgggggaggggacccagaggccatggctgcagccctggtggccaggggcccccctttggaggaacagggggctctgaggaggtacttgagggtccagcaggtccgctggcaccctgaccgcttcctgcagcgattccgaagccagattgagacctgggagctgggccgtgtgatgggagcagtgacagccctttctcaggccctgaatcgccatgcagaggccctcaagtgaccctagggaagaagcaagaaacttcggggctgcagcctcaggatgaggcagaaggaagggtaagggaaaggatggggaccacaaggaagagccaggtgctgctcagcagaggatatgggtgggagcgaaagttgtaacaagtgggggtggggggtgcgggccgccaccactgctccttgactctgccgtttcctaataagacctggttccacatctcaaaaaaaaaaaaaaaaaaaaaaaaaaaa

SEQ ID NO: 278 - DNA, 3922 bp, Homo sapiens
aagcttgctcttgcagccaaaagactaattgcaaaggcatcttctcagtgaagggggcggggtgggctagggctgagtggaaatggtgagagagattattgtagaaaatatctcttccgggaacttagggcaaagagttttattttcaggaatcacatccctgtctcccccaacctcagaccaggcccccaatctcctccccacaagaaaaagcaaaggcagtctgaaaacctgttgccaaaggaagggaacacttctgaaggaggaagttgagagtcttaggccaggtcttgaaggagggggtatcaattaagcagagactgattggaaggggacctaacgtgcctatgatagactcctttctgaggtttacctgtttttgtcgcgggcggtggcggggcgggtgcggtaatctagagaggtctgggttgtgtgagatattttgagttgaagaatctatttgactagtaaaaaagttgaactttaaagtggtagctttggggacagaggacatgggggttgcattgcaggagtcagcatggagcagggtgcttgtcacacagtttggatcttgtggtttcttacgcatggggccaaaataaacccaggtgaatggcctatgggagggagagagggaagggagcttgctagagccgaggtagagatgagttctttgagaaagagcgggcgtttgtgattgtgtagggggctgcccatagtggacatcctggtggatgtcctctgtccttaccatccttctcttctctctccagggtaacaagatgctcaactatagtgctcccagtgcagggggttgcctgctggacagaaaggcagtgggcacccctgctggtgggggcttccctcggaggcactcagtcaccctgcccagctccaagttccaccagaaccagctcctcagcagcctcaagggtgagccagcccccgctctgagctcgcgagacagccgcttccgagaccgctccttctcggaagggggcgagcggctgctgcccacccagaagcagcccgggggcggccaggtcaactccagccgctacaagacggagctgtgccgcccctttgaggaaaacggtgcctgtaagtacggggacaagtgccagttcgcacacggcatccacgagctccgcagcctgacccgccaccccaagtacaagacggagctgtgccgcaccttccacaccatcggcttttgcccctacgggccccgctgccacttcatccacaacgctgaagagcgccgtgccctggccggggcccgggacctctccgctgaccgtccccgcctccagcatagctttagctttgctgggtttcccagtgccgctgccaccgccgctgccaccgggctgctggacagccccacgtccatcaccccaccccctattctgagcgccgatgacctcctgggctcacctaccctgcccgatggcaccaataacccttttgccttctccagccaggagctggcaagcctctttgcccctagcatggggctgcccgggggtggctccccgaccaccttcctcttccggcccatgtccgagtcccctcacatgtttgactctccccccagccctcaggattctctctcggaccaggagggctacctgagcagctccagcagcagccacagtggctcagactccccgaccttggacaactcaagacgcctgcccatcttcagcagactttccatctcagatgactaagccagggtagggagggacctcctgcctactccagcccctaccctgcacccacatcccataccctcttctccctacccatcccattccccacaggccctacattaacaaggttaagctcaacccctttcccccagcacctcagaatgtgccctccctctccccctcataaccccacctaacataaggacaagtcaatttgtcagtagcttcttctggcttgaaaccccctccctggattttatagcccacttaccatgcataacagacaagtcccatattttgtcagtagatgcctttttttttcgcttaagccttaagtgccaaatcacaagagaaaaagcagtaacagtttacagaagcaacttagtgccttgtaatctaactttgtcactgtgactacattacctcttcagcgccagagggcacccgtgggcctcccggagcctctgcccatggcggggtggagacccggaaccagcagccccctccactggcgacacaactgcaccttccctcatttcagtctcccgcacacttattcctcctcccctcttcccggtggcacctctccacctgtaccgccccccaccccccccacccctgccccttggaagagttgttgccagaccagggttttgggggaaacctgtcttgacattcaaaacctttttcttcccgatctgaacccctgttgactaatcttgcctgggtttgtgtaggtctgcaggaaggaaggctgaaaaagcggacgaagattttgacttaagtggactttgtgatttaattttttcttttttttaagtggggaggaaggggaagctagatggactaggagagacttgattttggtgctaaagttccccagttcatatgtgacatctttttaaaaaaaataacaacaaaaaaaaaatgagagaaaagctaaaaaaaaaaaagtaaggggtgagcagttaatggtattcattccacatacaatatctgtgtaaaacgatttcctgtagaagtagctttaatggtttttgctctagaataccgtaggtctatccttagagcactcacgccatgctttcttccctgggttttaaacttcatataactttcagaaattggagagcaaaaattttgcttgtcactgcacatcaatataaaaaagcttatttaacttatcaaaacgtatttattgccaaactatgcttttttttgttaattttgttcatatttatcgggatgacaaatccatagaatatattcttttatgttaaattatgatcttcatattaatcttaaaattttgtgacgtgtctttttcctttttttccacagttttaatatattattcttcaacgacattttttgtaactttacacttttttggttattttattttaaaaaaatgaaaaattaatttaaaaaaatgcaaaaaactgttggattatttattttagaaattcccccctttgtgttggactgcaaattgagtttctttctctttaggcctttcacaactaggactgagaatgtatgtaaaagttctgtgacagtacagaaggaaaacaactttttatgtatagcttctaaaaggggaaaaaaaaaaaaaagagaaaccctttgacttccacgtgcccatctcaagacattccactcacagatttgaggttctggattccaggtctggagttttccaatgttaatgtaaacagaactggcacacacacattaagatgaatgtaattattattcctcttgctggtcactaccgtcgctttctatttctctttctttgtgtgaatttatttaaaagaaaaaaaactttttgtaacgactatttgcagtttaaaaatcaataaaccccgttttttcaagaaacattgatggtggagctggttttacttggttttggtttgactttgccagtaaggttctccccttgtataccttgcaagtcctggggagggggaggcggagagagagggctgtggctgtgggtggcggcatctctcatccctataagctaagcctatagctcccttccttgatgctggcagtttgctgcacttagaggggacggggtggaggttttctgcaaaggagcctgtacttcctgctgtattacttctgaaaagactgtgcagtgtgttagttgttggctgaatagcagcgggcccagccttgccgacacttgtgtggcc

SEQ ID NO: 279 - DNA, 2847 bp, Homo sapiens
ttgggggttgggagaaaggtggcggtgctttcggagggaataaaatggaaggagaatcaagcagatttgaaatccacactccagtttctgacaagaaaaagaaaaagtgttctatacataaggaaagacctcagaaacattcccacgaaattttcagagactcctccctggtgaatgaacagtctcaaataactaggaggaaaaagaggaaaaaagatttccagcatctcatttcttctcctttgaaaaaatccagaatctgtgatgagactgcaaatgccacttccacactcaaaaagagaaaaaagagaagatatagtgctttggaggtggacgaggaagcaggtgttacagttgtccttgtggataaagaaaatattaacaacacaccaaagcattttagaaaggatgttgatgttgtttgtgttgatatgagcatagaacagaagttaccaagaaagcctaaaacagacaaatttcaggtacttgctaagtcacatgcacataaatcagaagccctgcacagtaaagttagggagaaaaagaataaaaagcatcagaggaaagctgcatcctgggagagccagcgggcaagggacaccctgcctcagtcagaatcccaccaggaggagtcctggctttctgtgggtccagggggtgaaattacagaactaccagcatctgctcataaaaacaagtctaagaaaaaaaagaaaaagtccagtaaccgggaatatgagacactggccatgcctgaaggatcgcaagcaggcagagaggccgggactgatatgcaggaatcccagcctactgtgggcttggatgatgaaactccacaactactaggacctactcacaaaaaaaagtctaagaaaaaaaagaagaaaaagtccaatcaccaggaatttgaggcattggccatgcctgaaggatcacaagtgggcagtgaggttggggctgatatgcaggaatcccggcctgctgtgggcctgcatggtgaaactgcaggaataccagcacctgcttataaaaacaagtctaagaaaaaaaagaaaaagtccaatcaccaggaatttgaggcagtggccatgcctgagagcctcgagagtgcataccctgaaggatcacaggtgggcagtgaggttgggactgtggaaggcagtacagctcttaaagggttcaaggaatccaacagtacaaagaagaagtctaagaaaaggaagcttacgtctgtcaaaagggcacgagtgtctggtgatgatttttcagtgcccagtaagaactctgagagcacactctttgattcagtagaaggtgatggcgccatgatggaagaaggtgtgaaatctaggccccgacaaaagaaaacccaggcctgtttggcaagcaagcacgtgcaagaggcgccaaggttagaacctgcaaatgaagaacacaatgtggaaacagctgaagattccgaaataagatacttatctgcagattcaggagatgccgatgattcagatgcggatttgggttctgccgtgaaacagcttcaggagttcattcctaacatcaaggacagggccaccagcacaatcaagcggatgtaccgggacgacttggaacggtttaaggaatttaaagcacaaggtgtcgctattaaatttggcaagttttctgtaaaggaaaataagcagttagagaaaaatgtggaagactttctagccctgacaggcattgagagtgcagacaagctcctgtacacggacagatatcctgaggaaaaatctgtgatcaccaacttaaaaaggagatactcgtttagattacacattggtaggaacattgcccggccctggaaacttatatactatcgagcaaagaagatgttcgatgtcaacaattacaaaggcaggtatagcgaaggagatactgagaagttaaagatgtaccattctctccttgggaatgactggaagacgattggtgagatggtggcccgacgtagcctctccgtggccctcaagttctcacagatcagcagtcaaagaaatcgtggtgcttggagtaagtctgaaacccggaaactaatcaaggctgtcgaagaagtgattctgaagaagatgtctccccaggagttaaaagaggtggattccaaactccaagaaaatcctgaaagttgcctatcaattgttcgggaaaaactctacaagggcatatcttgggtagaagtagaagctaaagtgcaaaccagaaattggatgcagtgtaaaagtaagtggacagaaattctaaccaagaggatgactaatggtcggcgtatatactatggcatgaatgccctgcgggccaaggtcagccttattgaaaggttgtatgaaataaatgtggaagatactaatgaaatagactgggaagatcttgctagtgccataggtgatgttcctccatcttacgttcaaactaaattttctaggctgaaagctgtctatgttccattttggcagaaaaagacttttccagagatcatcgactacctttatgagacgactctacctttgctgaaggaaaagttagaaaaaatgatggagaaaaaaggcactaaaatccagactcctgcagcacccaagcaagttttcccatttcgagacatcttttattatgaagacgatagtgaaggaggaggacatagaaaaagaaagcgaaggggaattccgtaaagcctagaatcaaaagaaaacaaaacccatagtcaagccacagacaagcccagaataatatggccaggggatcaatccgattagccgactggcccagatccagcaggcaaaaaaggagaaggagccagagtacacgctcctc

SEQ ID NO: 280 - DNA, 729 bp, Homo sapiens
gaattcgggagcatggacctcagtcttctctgggtacttatgcccctagtcaccatggcctggggccagtatggcgattatggatacccataccagcagtatcatgactacagcgatgatgggtgggtgaatttgaatcggcaaggcttcagctaccagtgtccccaggggcaggtgatagtggccgtgaggagcatcttcagtaagaaggaaggttctgacagacaatggaactacgcctgcatgcccacgccacagagcctcggggaacccacggagtgctggtgggaggagatcaacagggctggcatggaatggtaccagacgtgctccaacaatgggctggtggcaggattccagagccgctacttcgagtcagtgctggatcgggagtggcagttttactgttgtcgctacagcaagaggtgcccatattcctgctggctaacaacagaatatccaggtcactatggtgaggaaatggacatgatttcctacaattatgattactatatccgaggagcaacaaccactttctctgcagtggaaagggatcgccagtggaagttcataatgtgccggatgactgaatacgactgtgaatttgcaaatgtttagatttgccacataccaaatctgggtgaaaggaaaggggccctccagctttccactgcagagaaagtggttgttgctcctcggtatatgtaatcataattgtagatcgaattc

SEQ ID NO: 281 - DNA, 2393 bp, Homo sapiens
gacgaggaggcggcgccgctgctgcggaggacggcgcggcccggcggggggacgccgctgctgaacggggctgggcccggggctgcgcgccagtcaccacgttctgcgcttttccgagtcggacatatgagcagcgtggagctggatgatgaacttttggacccggatatggaccctccacatcccttccccaaggagatcccacacaacgagaagctcctgtccctcaagtatgagagcttggactatgacaacagtgagaaccagctgttcctggaggaggagcggcggatcaatcacacggccttccggacggtggagatcaagcgctgggtcatctgcgccctcattgggatcctcacgggcctcgtggcctgcttcattgacatcgtggtggaaaacctggctggcctcaagtacagggtcatcaagggcaatatcgacaagttcacagagaagggcggactgtccttctccctgttgctgtgggccacgctgaacgccgccttcgtgctcgtgggctctgtgattgtggctttcatagagccggtggctgctggcagcggaatcccccagatcaagtgcttcctcaacggggtgaagatcccccacgtggtgcggctcaagacgttggtgatcaaagtgtccggtgtgatcctgtccgtggtcgggggcctggccgtgggaaaggaagggccgatgatccactcaggttcagtgattgccgccgggatctctcagggaaggtcaagctcactgaaacgagatttcaagatcttcgagtacctccgcagagacacagagaagcgggacttcgtctccgcaggggctgcggccggagtgtcagcggcgtttggagcccccgtgggtggggtcctgttcagcttggaggagggtgcgtccttctggaaccagttcctgacctggaggatcttctttgcttccatgatctccacgttcaccctgaattttgttctgagcatttaccacgggaacatgtgggacctgtccagcccaggcctcatcaacttcggaaggtttgactcggagaaaatggcctacacgatccacgagatcccggtcttcatcgccatgggcgtggtgggcggtgtgcttggagcagtgttcaatgccttgaactactggctgaccatgtttcgaatcaggtacatccaccggccctgcctgcaggtgattgaggccgtgctggtggccgccgtcacggccacagttgccttcgtgctgatctactcgtcgcgggattgccagcccctgcaggggggctccatgtcctacccgctgcagctcttttgtgcagatggcgagtacaactccatggctgcggccttcttcaacaccccggagaagagcgtggtgagcctcttccacgacccgccaggctcctacaaccccctgaccctcggcctgttcacgctggtctacttcttcctggcctgctggacctacgggctcacggtgtctgccggggtcttcatcccgtccctgctcatcggggctgcctggggccggctctttgggatctccctgtcctacctcacgggggcggcgatctgggcggaccccggcaaatacgccctgatgggagctgctgcccagctgggcgggattgtgcggatgacactgagcctgaccgtcatcatgatggaggccaccagcaacgtgacctacggcttccccatcatgctggtgctcatgaccgccaagatcgtgggcgacgtcttcattgagggcctgtacgacatgcacattcagctgcagagtgtgcccttcctgcactgggaggccccggtcacctcacactcactcactgccagggaggtgatgagcacaccagtgacctgcctgaggcggcgtgagaaggtcggcgtcattgtggacgtgctgagcgacacggcgtccaatcacaacggcttccccgtggtggagcatgccgatgacacccagcctgcccggctccagggcctgatcctgcgctcccagctcatcgttctcctaaagcacaaggtgtttgtggagcggtccaacctgggcctggtacagcggcgcctgaggctgaaggacttccgagacgcctacccgcgcttcccacccatccagtccatccacgtgtcccaggacgagcgggagtgcaccatggacctctccgagttcatgaacccctccccctacacggtgccccaggaggcgtcgctcccacgggtgttcaagctgttccgggccctgggcctgcggcacctggtggtggtggacaaccgcaatcaggttgtcgggttggtgaccaggaaggacctcgccaggtaccgcctgggaaagagaggcttggaggagctctcgctggcccagacgtgaggcccagccctgcccataatggg

SEQ ID NO: 282 - DNA, 14255 bp, Homo sapiens
gcggcggcggcggcgggaagcagcggggctggggttccagggggagcggccgccgcctcagcagcctcctcgtcgtccgcctcgtcttcgtcttcgtcatcgtcctcagcctcttcagggccggccctgctccgggtgggcccgggcttcgacgcggcgctgcaggtctcggccgccatcggcaccaacctgcgccggttccgggccgtgtttggggagagcggcgggggaggcggcagcggagaggatgagcaattcttaggttttggctcagatgaagaagtcagagtgcgaagtcccacaaggtctccttcagttaaaactagtcctcgaaaacctcgtgggagacctagaagtggctctgaccgaaattcagctatcctctcagatccatctgtgttttcccctctaaataaatcagagaccaaatctggagataagatcaagaagaaagattctaaaagtatagaaaagaagagaggaagacctcccaccttccctggagtaaaaatcaaaataacacatggaaaggacatttcagagttaccaaagggaaacaaagaagatagcctgaaaaaaattaaaaggacaccttctgctacgtttcagcaagccacaaagattaaaaaattaagagcaggtaaactctctcctctcaagtctaagtttaagacagggaagcttcaaataggaaggaagggggtacaaattgtacgacggagaggaaggcctccatcaacagaaaggataaagaccccttcgggtctcctcattaattctgaactggaaaagccccagaaagtccggaaagacaaggaaggaacacctccacttacaaaagaagataagacagttgtcagacaaagccctcgaaggattaagccagttaggattattccttcttcaaaaaggacagatgcaaccattgctaagcaactcttacagagggcaaaaaagggggctcaaaagaaaattgaaaaagaagcagctcagctgcagggaagaaaggtgaagacacaggtcaaaaatattcgacagttcatcatgcctgttgtcagtgctatctcctcgcggatcattaagacccctcggcggtttatagaggatgaggattatgaccctccaattaaaattgcccgattagagtctacaccgaatagtagattcagtgccccgtcctgtggatcttctgaaaaatcaagtgcagcttctcagcactcctctcaaatgtcttcagactcctctcgatctagtagccccagtgttgatacctccacagactctcaggcttctgaggagattcaggtacttcctgaggagcggagcgatacccctgaagttcatcctccactgcccatttcccagtccccagaaaatgagagtaatgataggagaagcagaaggtattcagtgtcggagagaagttttggatctagaacgacgaaaaaattatcaactctacaaagtgccccccagcaggagacctcctcgtctccacctccacctctgctgactccaccgccaccactgcagccagcctccagtatctctgaccacacaccttggcttatgcctccaacaatccccttagcatcaccatttttgcctgcttccactgctcctatgcaagggaagcgaaaatctattttgcgagaaccgacatttaggtggacttctttaaagcattctaggtcagagccacaatacttttcctcagcaaagtatgccaaagaaggtcttattcgcaaaccaatatttgataatttccgaccccctccactaactcccgaggacgttggctttgcatctggtttttctgcatctggtaccgctgcttcagcccgattgttttcgccactccattctggaacaaggtttgatatgcacaaaaggagccctcttctgagagctccaagatttactccaagtgaggctcactctagaatatttgagtctgtaaccttgcctagtaatcgaacttctgctggaacatcttcttcaggagtatccaatagaaaaaggaaaagaaaagtgtttagtcctattcgatctgaaccaagatctccttctcactccatgaggacaagaagtggaaggcttagtagttctgagctctcacctctcacccccccgtcttctgtctcttcctcgttaagcatttctgttagtcctcttgccactagtgccttaaacccaacttttacttttccttctcattccctgactcagtctggggaatctgcagagaaaaatcagagaccaaggaagcagactagtgctccggcagagccattttcatcaagtagtcctactcctctcttcccttggtttaccccaggctctcagactgaaagagggagaaataaagacaaggcccccgaggagctgtccaaagatcgagatgctgacaagagcgtggagaaggacaagagtagagagagagaccgggagagagaaaaggagaataagcgggagtcaaggaaagagaaaaggaaaaagggatcagaaattcagagtagttctgctttgtatcctgtgggtagggtttccaaagagaaggttgttggtgaagatgttgccacttcatcttctgccaaaaaagcaacagggcggaagaagtcttcatcacatgattctgggactgatattacttctgtgactcttggggatacaacagctgtcaaaaccaaaatacttataaagaaagggagaggaaatctggaaaaaaccaacttggacctcggcccaactgccccatccctggagaaggagaaaaccctctgcctttccactccttcatctagcactgttaaacattccacttcctccataggctccatgttggctcaggcagacaagcttccaatgactgacaagagggttgccagcctcctaaaaaaggccaaagctcagctctgcaagattgagaagagtaagagtcttaaacaaaccgaccagcccaaagcacagggtcaagaaagtgactcatcagagacctctgtgcgaggaccccggattaaacatgtctgcagaagagcagctgttgcccttggccgaaaacgagctgtgtttcctgatgacatgcccaccctgagtgccttaccatgggaagaacgagaaaagattttgtcttccatggggaatgatgacaagtcatcaattgctggctcagaagatgctgaacctcttgctccacccatcaaaccaattaaacctgtcactagaaacaaggcaccccaggaacctccagtaaagaaaggacgtcgatcgaggcggtgtgggcagtgtcccggctgccaggtgcctgaggactgtggtgtttgtactaattgcttagataagcccaagtttggtggtcgcaatataaagaagcagtgctgcaagatgagaaaatgtcagaatctacaatggatgccttccaaagcctacctgcagaagcaagctaaagctgtgaaaaagaaagagaaaaagtctaagaccagtgaaaagaaagacagcaaagagagcagtgttgtgaagaacgtggtggactctagtcagaaacctaccccatcagcaagagaggatcctgccccaaagaaaagcagtagtgagcctcctccacgaaagcccgtcgaggaaaagagtgaagaagggaatgtctcggcccctgggcctgaatccaaacaggccaccactccagcttccaggaagtcaagcaagcaggtctcccagccagcactggtcatcccgcctcagccacctactacaggaccgccaagaaaagaagttcccaaaaccactcctagtgagcccaagaaaaagcagcctccaccaccagaatcaggtccagagcagagcaaacagaaaaaagtggctccccgcccaagtatccctgtaaaacaaaaaccaaaagaaaaggaaaaaccacctccggtcaataagcaggagaatgcaggcactttgaacatcctcagcactctctccaatggcaatagttctaagcaaaaaattccagcagatggagtccacaggatcagagtggactttaaggaggattgtgaagcagaaaatgtgtgggagatgggaggcttaggaatcttgacttctgttcctataacacccagggtggtttgctttctctgtgccagtagtgggcatgtagagtttgtgtattgccaagtctgttgtgagcccttccacaagttttgtttagaggagaacgagcgccctctggaggaccagctggaaaattggtgttgtcgtcgttgcaaattctgtcacgtttgtggaaggcaacatcaggctacaaagcagctgctggagtgtaataagtgccgaaacagctatcaccctgagtgcctgggaccaaactaccccaccaaacccacaaagaagaagaaagtctggatctgtaccaagtgtgttcgctgtaagagctgtggatccacaactccaggcaaagggtgggatgcacagtggtctcatgatttctcactgtgtcatgattgcgccaagctctttgctaaaggaaacttctgccctctctgtgacaaatgttatgatgatgatgactatgagagtaagatgatgcaatgtggaaagtgtgatcgctgggtccattccaaatgtgagaatctttcaggtacagaagatgagatgtatgagattctatctaatctgccagaaagtgtggcctacacttgtgtgaactgtactgagcggcaccctgcagagtggcgactggcccttgaaaaagagctgcagatttctctgaagcaagttctgacagctttgttgaattctcggactaccagccatttgctacgctaccggcaggctgccaagcctccagacttaaatcccgagacagaggagagtataccttcccgcagctcccccgaaggacctgatccaccagttcttactgaggtcagcaaacaggatgatcagcagcctttagatctagaaggagtcaagaggaagatggaccaagggaattacacatctgtgttggagttcagtgatgatattgtgaagatcattcaagcagccattaattcagatggaggacagccagaaattaaaaaagccaacagcatggtcaagtccttcttcattcggcaaatggaacgtgtttttccatggttcagtgtcaaaaagtccaggttttgggagccaaataaagtatcaagcaacagtgggatgttaccaaacgcagtgcttccaccttcacttgaccataattatgctcagtggcaggagcgagaggaaaacagccacactgagcagcctcctttaatgaagaaaatcattccagctcccaaacccaaaggtcctggagaaccagactcaccaactcctctgcatcctcctacaccaccaattttgagtactgataggagtcgagaagacagtccagagctgaacccacccccaggcatagaagacaatagacagtgtgcgttatgtttgacttatggtgatgacagtgctaatgatgctggtcgtttactatatattggccaaaatgagtggacacatgtaaattgtgctttgtggtcagcggaagtgtttgaagatgatgacggatcactaaagaatgtgcatatggctgtgatcaggggcaagcagctgagatgtgaattctgccaaaagccaggagccaccgtgggttgctgtctcacatcctgcaccagcaactatcacttcatgtgttcccgagccaagaactgtgtctttctggatgataaaaaagtatattgccaacgacatcgggatttgatcaaaggcgaagtggttcctgagaatggatttgaagttttcagaagagtgtttgtggactttgaaggaatcagcttgagaaggaagtttctcaatggcttggaaccagaaaatatccacatgatgattgggtctatgacaatcgactgcttaggaattctaaatgatctctccgactgtgaagataagctctttcctattggatatcagtgttccagggtatactggagcaccacagatgctcgcaagcgctgtgtatatacatgcaagatagtggagtgccgtcctccagtcgtagagccggatatcaacagcactgttgaacatgatgaaaacaggaccattgcccatagtccaacatcttttacagaaagttcatcaaaagagagtcaaaacacagctgaaattataagtcctccatcaccagaccgacctcctcattcacaaacctctggctcctgttattatcatgtcatctcaaaggtccccaggattcgaacacccagttattctccaacacagagatcccctggctgtcgaccgttgccttctgcaggaagtcctaccccaaccactcatgaaatagtcacagtaggtgatcctttactctcctctggacttcgaagcattggctccaggcgtcacagtacctcttccttatcaccccagcggtccaaactccggataatgtctccaatgagaactgggaatacttactctaggaataatgtttcctcagtctccaccaccgggaccgctactgatcttgaatcaagtgccaaagtagttgatcatgtcttagggccactgaattcaagtactagtttagggcaaaacacttccacctcttcaaatttgcaaaggacagtggttactgtaggcaataaaaacagtcacttggatggatcttcatcttcagaaatgaagcagtccagtgcttcagacttggtgtccaagagctcctctttaaagggagagaagaccaaagtgctgagttccaagagctcagagggatctgcacataatgtggcttaccctggaattcctaaactggccccacaggttcataacacaacatctagagaactgaatgttagtaaaatcggctcctttgctgaaccctcttcagtgtcgttttcttctaaagaggccctctccttcccacacctccatttgagagggcaaaggaatgatcgagaccaacacacagattctacccaatcagcaaactcctctccagatgaagatactgaagtcaaaaccttgaagctatctggaatgagcaacagatcatccattatcaacgaacatatgggatctagttccagagataggagacagaaagggaaaaaatcctgtaaagaaactttcaaagaaaagcattccagtaaatcttttttggaacctggtcaggtgacaactggtgaggaaggaaacttgaagccagagtttatggatgaggttttgactcctgagtatatgggccaacgaccatgtaacaatgtttcttctgataagattggtgataaaggcctttctatgccaggagtccccaaagctccacccatgcaagtagaaggatctgccaaggaattacaggcaccacggaaacgcacagtcaaagtgacactgacacctctaaaaatggaaaatgagagtcaatccaaaaatgccctgaaagaaagtagtcctgcttcccctttgcaaatagagtcaacatctcccacagaaccaatttcagcctctgaaaatccaggagatggtccagtggcccaaccaagccccaataatacctcatgccaggattctcaaagtaacaactatcagaatcttccagtacaggacagaaacctaatgcttccagatggccccaaacctcaggaggatggctcttttaaaaggaggtatccccgtcgcagtgcccgtgcacgttctaacatgttttttgggcttaccccactctatggagtaagatcctatggtgaagaagacattccattctacagcagctcaactgggaagaagcgaggcaagagatcagctgaaggacaggtggatggggccgatgacttaagcacttcagatgaagacgacttatactattacaacttcactagaacagtgatttcttcaggtggagaggaacgactggcatcccataatttatttcgggaggaggaacagtgtgatcttccaaaaatctcacagttggatggtgttgatgatgggacagagagtgatactagtgtcacagccacaacaaggaaaagcagccagattccaaaaagaaatggtaaagaaaatggaacagagaacttaaagattgatagacctgaagatgctggggagaaagaacatgtcactaagagttctgttggccacaaaaatgagccaaagatggataactgccattctgtaagcagagttaaaacacagggacaagattccttggaagctcagctcagctcattggagtcaagccgcagagtccacacaagtaccccctccgacaaaaatttactggacacctataatactgagctcctgaaatcagattcagacaataacaacagtgatgactgtgggaatatcctgccttcagacattatggactttgtactaaagaatactccatccatgcaggctttgggtgagagcccagagtcatcttcatcagaactcctgaatcttggtgaaggattgggtcttgacagtaatcgtgaaaaagacatgggtctttttgaagtattttctcagcagctgcctacaacagaacctgtggatagtagtgtctcttcctctatctcagcagaggaacagtttgagttgcctctagagctaccatctgatctgtctgtcttgaccacccggagtcccactgtccccagccagaatcccagtagactagctgttatctcagactcaggggagaagagagtaaccatcacagaaaaatctgtagcctcctctgaaagtgacccagcactgctgagcccaggagtagatccaactcctgaaggccacatgactcctgatcattttatccaaggacacatggatgcagaccacatctctagccctccttgtggttcagtagagcaaggtcatggcaacaatcaggatttaactaggaacagtagcacccctggccttcaggtacctgtttccccaactgttcccatccagaaccagaagtatgtgcccaattctactgatagtcctggcccgtctcagatttccaatgcagctgtccagaccactccaccccacctgaagccagccactgagaaactcatagttgttaaccagaacatgcagccactttatgttctccaaactcttccaaatggagtgacccaaaaaatccaattgacctcttctgttagttctacacccagtgtgatggagacaaatacttcagtattgggacccatgggaggtggtctcacccttaccacaggactaaatccaagcttgccaacttctcaatctttgttcccttctgctagcaaaggattgctacccatgtctcatcaccagcacttacattccttccctgcagctactcaaagtagtttcccaccaaacatcagcaatcctccttcaggcctgcttattggggttcagcctcctccggatccccaacttttggtttcagaatccagccagaggacagacctcagtaccacagtagccactccatcctctggactcaagaaaagacccatatctcgtctacagacccgaaagaataaaaaacttgctccctctagtaccccttcaaacattgccccttctgatgtggtttctaatatgacattgattaacttcacaccctcccagcttcctaatcatccaagtctgttagatttggggtcacttaatacttcatctcaccgaactgtccccaacatcataaaaagatctaaatctagcatcatgtattttgaaccggcacccctgttaccacagagtgtgggaggaactgctgccacagcggcaggcacatcaacaataagccaggatactagccacctcacatcagggtctgtgtctggcttggcatccagttcctctgtcttgaatgttgtatccatgcaaactaccacaacccctacaagtagtgcgtcagttccaggacacgtcaccttaaccaacccaaggttgcttggtaccccagatattggctcaataagcaatcttttaatcaaagctagccagcagagcctggggattcaggaccagcctgtggctttaccgccaagttcaggaatgtttccacaactggggacatcacagaccccctctactgctgcaataacagcggcatctagcatctgtgtgctcccctccactcagactacgggcataacagccgcttcaccttctggggaagcagacgaacactatcagcttcagcatgtgaaccagctccttgccagcaaaactgggattcattcttcccagcgtgatcttgattctgcttcagggccccaggtatccaactttacccagacggtagacgctcctaatagcatgggactggagcagaacaaggctttatcctcagctgtgcaagccagccccacctctcctgggggttctccatcctctccatcttctggacagcggtcagcaagcccttcagtgccgggtcccactaaacccaaaccaaaaaccaaacggtttcagctgcctctagacaaagggaatggcaagaagcacaatgtttcccatttgcggaccagttcttctgaagcacacattccagaccaagaaacgacatccctgacctcaggcacagggactccaggagcagaggctgagcagcaggatacagctagcgtggagcagtcctcccagaaggagtgtgggcaacctgcagggcaagtcgctgttcttccggaagttcaggtgacccaaaatccagcaaatgaacaagaaagtgcagaacctaaaacagtggaagaagaggaaagtaatttcagctccccactgatgctttggcttcagcaagaacaaaagcggaaggaaagcattactgagaaaaaacccaagaaaggacttgtttttgaaatttccagtgatgatggctttcagatctgtgcagaaagtattgaagatgcctggaagtcattgacagataaagtccaggaagctcgatcaaatgcccgcctaaagcagctctcatttgcaggtgttaacggtttgaggatgctggggattctccatgatgcagttgtgttcctcattgagcagctgtctggtgccaagcactgtcgaaattacaaattccgtttccacaagccagaggaggccaatgaaccccccttgaaccctcacggctcagccagggctgaagtccacctcaggaagtcagcatttgacatgtttaacttcctggcttctaaacatcgtcagcctcctgaatacaaccccaatgatgaagaagaggaggaggtacagctgaagtcagctcggagggcaactagcatggatctgccaatgcccatgcgcttccggcacttaaaaaagacttctaaggaggcagttggtgtctacaggtctcccatccatggccggggtcttttctgtaagagaaacattgatgcaggtgagatggtgattgagtatgccggcaacgtcatccgctccatccagactgacaagcgggaaaagtattacgacagcaagggcattggttgctatatgttccgaattgatgactcagaggtagtggatgccaccatgcatggaaatgctgcacgcttcatcaatcactcgtgtgagcctaactgctattctcgggtcatcaatattgatgggcagaagcacattgtcatctttgccatgcgtaagatctaccgaggagaggaactcacttacgactataagttccccattgaggatgccagcaacaagctgccctgcaactgtggcgccaagaaatgccggaagttcctaaactaaagctgctcttctcccccagtgttggagtgcaaggaggcggggccatccaaagcaacgctgaaggccttttccagcagctgggagctcccggattgcgtggcacagctgaggggcctctgtgatggctgagctctcttatgtcctatactcacatcagacatgtgatcatagtcccagagacagagttgaggtctcgaagaaaagatccatgatcggctttctcctggggcccctccaattgtttactgttagaaagtgggaatggggtccctagcagacttgcctggaaggagcctattatagagggttggttatgttgggagattgggcctgaatttctccacagaaataagttgccatcctcaggttggccctttcccaagcactgtaagtgagtgggtcagccaaagccccaaatggagggttggttagattcctgacagtttgccagccagccgccacctacagcgtctgtcgaacaaacagaggtctggtggttttccctactgtcctcccactcgagagttcacttctggttgggagacaggattcctagcacctccggtgtcaaaaggctgtcatggggttgtgccaattaattaccaaacattgagcctgcaggctttgagtgggagtgttgcccccaggagccttatctcagccaattacctttcttgacagtaggagcggcttccctctcccattccctcttcactcccttttcttcctttcccctgtcttcatgccactgctttcccatgcttctttcggttgtaggggagactgactgcctgctcaaggacactccctgctgggcataggatgtgcctgcaaaaagttccctgagcctgtaagcactccaggtggggaagtggacaggagccattggtcataaccagacagaatttggaaacattttcataaagctccatggagagttttaaagaaacatatgtagcatgattttgtaggagaggaaaaagattatttaaataggatttaaatcatgcaacaacgagagtatcacagccaggatgacccttgggtcccattcctaagacatggttactttattttccccttgttaagacataggaagacttaatttttaaacggtcagtgtccagttgaaggcagaacactaatcagatttcaaggcccacaacttggggactagaccaccttatgttgagggaactctgccacctgcgtgcaacccacagctaaagtaaattcaatgacactactgccctgattactccttaggatgtggtcaaaacagcatcaaatgtttcttctcttcctttccccaagacagagtcctgaacctgttaaattaagtcattggattttactctgttctgtttacagtttactatttaaggttttataaatgtaaatatattttgtatatttttctatgagaagcacttcatagggagaagcacttatgacaaggctattttttaaaccgcggtattatcctaatttaaaagaagatcggtttttaataattttttattttcataggatgaagttagagaaaatattcagctgtacacacaaagtctggtttttcctgcccaacttccccctggaaggtgtactttttgttgtttaatgtgtagcttgtttgtgccctgttgacataaatgtttcctgggtttgctctttgacaataaatggagaaggaaggtcacccaactccattgggccactcccctccttcccctattgaagctcctcaaaaggctacagtaatatcttgatacaacagattctcttctttcccgcctctctcctttccggcgcaacttccagagtggtgggagacggcaatctttacatttccctcatctttcttacttcagagttagcaaacaacaagttgaatggcaacttgacatttttgcatcaccatctgcctcataggccactctttcctttccctctgcccaccaagtcctcatatctgcagagaacccattgatcaccttgtgccctcttttggggcagcctgttgaaactgaagcacagtctgaccactcacgataaagcagattttctctgcctctgccacaaggtttcagagtagtgtagtccaagtagagggtggggcacccttttctcgccgcaagaagcccattcctatggaagtctagcaaagcaatacgactcagcccagcactctctgccccaggactcatggctctgctgtgccttccatcctgggctcccttctctcctgtgaccttaagaactttgtctggtggctttgctggaacattgtcactgttttcactgtcatgcagggagcccagcactgtggccaggatggcagagacttccttgtcatcatggagaagtgccagcaggggactgggaaaagcactctacccagacctcacctcccttcctccttttgcccatgaacaagatgcagtggccctaggggttccactagtgtctgctttcctttattattgcactgtgtgaggtttttttgtaaatccttgtattcc

SEQ ID NO: 283 - DNA, 3863 bp, Homo sapiens
gagatggagactcgctctgtcacccaggctggagtgcaatggtgagatctcggctcactgcaacctccacctcctgggttcaggcgattctcctgcctcccaatcctagtagctgggagtatcaggtgagtcgcagccccaacgcacgcccggcataatttttttatttttagtcgagacgggtttcaccacgttggccaggatggtctcgaactcctgacctcaggtgatccacccgcctcggcctcccaaagcactgggattacaggcgtgagccaccgcgcccggcctccatatccattcttgggaacacttgttgcttagctgaacggagcccgcatcctgctgtggcggcactcgccccggtgctggtctgagcagacgcctcctttctcttgcagaagaagtaagtgaggaagaaatgagtgaagatgaagaacgagaaaatgaaaaccacctcttggttgttccagagtcacggttcgaccgagattccggggagagtgaagaagcagaggaagaagtgggtgagggaacgccgcagagcagcgccctgacagagggcgactatgtgcccgactcccctgccctgtcgcccatcgagctcaagcaggagctgcccaagtacctgccggccctgcagggctgccggagcgtcgaggagttccagtgcctgaacaggatcgaggagggcacctatggagtggtctacagagcaaaagacaagaaaacagatgaaattgtggctctaaagcggctgaagatggagaaggagaaggagggcttcccgatcacgtcgctgagggagatcaacaccatcctcaaggcccagcatcccaacatcgtcaccgttagagagattgtggtgggcagcaacatggacaagatctacatcgtgatgaactatgtggagcacgacctcaagagcctgatggagaccatgaaacagcccttcctgccaggggaggtgaagaccctgatgatccagctgctgcgtggggtgaaacacctgcacgacaactggatcctgcaccgtgacctcaagacgtccaacctgctgctgagccacgccggcatcctcaaggtgggtgacttcgggctggcgcgggagtacggatcccctctgaaggcctacaccccggtcgtggtgaccctgtggtaccgcgccccagagctgctgcttggtgccaaggaatactccacggccgtggacatgtggtcagtgggttgcatcttcggggagctgctgactcagaagcctctgttccccgggaagtcagaaatcgatcagatcaacaaggtgttcaaggatctggggacccctagtgagaaaatctggcccggctacagcgagctcccagcagtcaagaagatgaccttcagcgagcacccctacaacaacctccgcaagcgcttcggggctctgctctcagaccagggcttcgacctcatgaacaagttcctgacctacttccccgggaggaggatcagcgctgaggacggcctcaagcatgagtatttccgcgagacccccctccccatcgacccctccatgttccccacgtggcccgccaagagcgagcagcagcgtgtgaagcggggcaccagcccgaggccccctgagggaggcctgggctacagccagctgggtgacgacgacctgaaggagacgggcttccaccttaccaccacgaaccagggggcctctgccgcgggccccggcttcagcctcaagttctgaaggtcagagtggaccccgtcatggggagaactcagccgggaccacaggcgtggctactgcggctggagctgcgatgagactcggaactcctcgtcttactttgtgctccatgttttgtttttgtattttggtttgtaaatttgtagaattaaatcattttccttgtaaacccgaattcgggaccatcacagtttgattagcctcagcctcaagagctggcacatgcttgtgaacttgtgctttcatattttcctaacctgtgtgctctttgtgggaggaataacccagactaggaatgccagcatctgccaagcagttgggataattcttcactattccacccttgccacagtactatgggtaggagtgacagctcgaaatatctacaaacaagtcactaaaaaagctaaaagatgccaggatcctgatgaaccaccacctccaccaagaccaatgctcagattttacctgattggtggtggtatccccatcattgtttgcggcataactgcaggcagcgaacattaagaattacggcagtcggccaaacgcaccctattgctggatggcatgggaaccctccttgggagccttctatgggccagccagcttcagcacttttgtaaactgcatgtactttctgagcatatttattcagttgaaaagacaccctgagcgcaaatatgagcttaaggagcccactggccagcaacagagattggcatgccaatgaaaatggcgaaataaatcatcaggaaatcatttctttgtctctgatttctacatcagccttggaaaatgagcacacttttcattctcagctcttggggccagccttactttgctcttatatgttgcactgtggatgtttggggctttggctgtttctttgtattaccctttggacttggtttttagcttcgtttttggagccacaagtttaagcttcagtgcattcttcatggtccaccattgtgttaatagggaggatcttagacttgcgtggatcatgacttgctgcccaggacggagctcgtattcagtgcaagtcaacgtccagccccccaactctaatgggacgaatggagaggcacccaaatgccccaatagcagtgcggagtcttcatgcacaaacaaaagtgattcaagcttcaaaattcctcccagggctgcaaattaacaaacttgcaggcggctgcagctcagtgccatgccaattctttacctttgaactccacccctcagcttgataatagtctgacagaacattcaatggacaatgatattaaaatgcacgctggcgcctttagaagttcagtttcgaacaaatgtgcactcaagccgccaccataaaaacagaagtaaaggacaccgggcaagccgactcacagtcctgagagaatatgcctacgatgtcccaacgagcgtggaaggaagcgtgcagaacggcttacctaaaagccggctgggcaataacgaaggacactcgaggagccgaagagcttatttagcctacagagagagacagtacaacccaccccagcaagacagcagcgatgcttgtagcacacttcccaaaagtagcagaaattttgaaaagccagtttcaaccactagtaaaaagatgcgttaagggaagccagctgtggttgaacttcaaaatcagcaaaaatcttatggcctcaacttggccattcagaatggaccaattaaaagcaatgggcaggagggacccttgctcggtaccgatagcactggcaatgttaccactggattatggaaacacgaaactactgtgtaacattgctgggcttcctaggcagaaattcatataaactgtgatactcacattccttgaagctatgagcatttaaaaactgtttacagccaccatagggattcaaaagaatttggaataaactttgaagttttggattttacttatttttatccccaaattgttgctattttttaggatctgaaacaaaatctttctaaaacattgttttagttgtcaaagcaccaacaggacattttgggatgtgaaatgtaatttcttggaatctgtaatttgtacttaatatttcaggcttgtatttaatataataaataggtgtttgtt

SEQ ID NO: 284 - DNA, 5769 bp, Homo sapiens
  misc_feature (1)...(5769): n=a,t,g or c
gagctctccatgcacacctgttactgtttctgtttttacctgtaaatatctgtctctgacttccatgtctcatgcacctctatagggcaaagactgtgtcttaaacatcacggtagcctcagcatgttgtgcaatcaaggtttttttgtttttgttctttgttttttttttggtattagctttatttgtatcattttgaaatttttatcaaaaaagcagcgtgcctgctgtggttcccatcctctgggatttaggaatctttacccgattctccatccaagtctgtctttcgtattctaggctcttcctaaagttgtcattcacatataccctccagaattttatagggtgtataatctgtaacaactcggaggaagccaattgccctttagaaatatggctgcaattgcctcacttcctgtgtcatgtgactctcctagtcatcacatgacccatccacattgggaagccagaattacttgcaggagtaacctagtgcctatagctatggcaggtacctgcatccttgtttttgtttagtggatcctctatccttcagagactctggaacccctgtgctcttctcctcatctagtgaccctgaggtgatggagttttcaagtccttccagagaggtaagagagagagctcccaatcagcattgtcacagtgcttctggaatcctggcactggaatttaatgaatgacagactctctttgaatccagggccatcatggctctttgagcaaggcacagatggaggggagggtcgaagttgaaatgggtgggaagagtggtggggagcatcctgatttggggtgggcagagagttgtcatcagaagggttgcagggagagctgcacccaggtgtctgtgggccttgtcctaatgaatgtgggagaccaggccatgggcacccaaaggcagctaagccctgcccgggagagtagttgaggggtggagagggacttgcttttcagtcattcctcattctgtcctcaggaatgtcccaagccttcgggtagggtaagcatcatggctggcagcctcacaggattgcttctacttcaggcagtgtcgtgggcatcagatgagtgagtcaaggcagtggggaggtagcacagagcctcccttctgcctcatagtcctttggtagccttccagtaagctggtggtagacttttagtaggtgctcaataaatccttttgagtgactgagaccaactttggggtgaggatttttgaaaccgtcttcagtctctccaaacagctgtgtccgttctccacatccttgtcagacctcacctctgcttgtgctccctccctcccaggtggtgcccctgcatccctaaaagcttcagtacagctcggtggtctgtgtctgcaatgccacatactgtgactcttgaccccccgacctttcctgccctaggtgccttcagccgctacaagagcagaagcagtgggcattggatggagctgagtacaggaccatacaggctaattgcaccggcacaggtaaccattacacccttcaccccccgggccaggctgggtcctcctagaggtaaacggtgtcagtgatcaccatggagtttctccctgggcactgataaccctgtggatgtcctcaggcctgctactgatcctgcagccagaagttccagaaagtgaagggatttggaggggccgtgacagatgcaggtgccctcaacatccttgccctgtcaccccctgcccagaatttgctacttaaatggtacttctctgaagaagatgaggaggaaggggacaggatgacatagagccactgacacttttctttgccaattctttggaccctgacttctgcccatccctgacatttggttcctgtcttaatgccagtgaaataagatttcgccgcctatcatctgctaactgctacggactcaggctcagaaaggcctgcgcttcacccaggtgccagcctccacaggttccaacccaggagcccaagttccttttggccctgactcagacactattaggactggcaagtgataagcagagtcccatactctcctattgactcggactaccatatcttgatcatccttttctgtaggaatcggatataacatcatctgggtacccatggccagctgtgacttctccatccgcacctacacctatgcagacacccctgatgatttccagttgcacaacttcagcctcccagaggaagataccaagctcaaggtaggcattctagctttttcaggccctgagggccctgatgtctgggggttgagaaactgtagggtaggtctgcttgtacagacattttgtcccctgctgttttgtcctgggggtgggagggtgggggctaatggctgaaccggatgcactggttgggctagtatgtgttccaactctgggtgcttctctcttcactacctttgtctctagatacccctgattcaccgagccctgcagttggcccagcgtcccgtttcactccttgccagcccctggacatcacccacttggctcaagaccaggggagcggggaatgggaaggggccactcaagggacagcccagagacatctaccaccagacctgggccagatacattgtgaagtaagggatcaacaaggatgtgggatcaggactggcctcccctttggccatgctgatctgtgtcccaaccctcaacctggttccacttccagatctgcctgtcctcagctcacctttctaccttctgggcctttcaaccttgggcctgtcagtcttgcccactccatcaggcttcctgttctctcggtctggcccactttcttggctggatcattcatgacctttctcttgccaggttcctggatgcctatgctgagcacaagttacagttctgggcagtgacaggtgaaaatgagccttctgctgggctgttgagtggataccccttccagtgcctgggcttcacccctgaacatcagcgagacttcattgcccgtgacctaggtcctacccttgccaacggtactcaccacaatgtccgcctactcatgctggatgaccaacgcttgctgctgccccactgggcaaaggtggtaaggcctggacctccatggtgctccagtgaccttcaaatccagcatccaaatgattggctcccaaacttagagggatttttctacccaactatggatccctagagcaccattccccgggacctccagggtgccatggatcccacagttgggacttgaaacctctctagggctgggggtggtagctcatggctataattccagcactttgggaaccaaggtgggtggatcacttgaacctaaggagttcaagatgagcctgggaaacatggtgaaaccctaactctacaaaaaaaaaaatagaaaagttagccgggtgtggtggtggcacgctatagtcccagtattctggaggctaaggcgggaggtttagttgagcctaggaatttcaggctgcagtgagctatgattgtgccactgtactccagcctgtgtgacagagggagaccctgtctcaaaaacaaaaacaaaaaatccctcccaaaacctctgtagttgcattcttcccaccacctaattcaggattcctacaagaggaactagaagttccagaagcctgtgggcagggtccagggtgacttgttcttcctttgcaggtactgacagacccagaagcagctaagtatgttcatggtattgctgtacattggtacctggactttctggctccagccaaagccaccctaagggagacacaccacctgttccccaacaccatgctctttgcctcagaggcctgtgtgggttccaagttctgggagcagagtgtgcggctaggctcctgggatcgagggatgcagtacagccacagcatcatcacagtaagccaccccagtctcccttcctgcaaaggagacctcagacccattagtagtctcaccaaagactgatagaagcccttcctgtccagctttccccaggtagcctgcccttttgcgcaactctggggaaccatgattccctgtcttgcctttccttcacaggtctgcacacctcattgccccttttgcaactactgaggcacttgcagctgcctcagacttctcagctccccttgagatgcctggatcttcacacccccaactccttagctactaaggaatgtgccctcacagggctgacctacccacagctgcctctcccacatgtgacccttacctacactctctggggacccccagtgttgagcctttgtctctttgcctttgtccttaccctagaacctcctgtaccatgtggtcggctggaccgactggaacccatcattgtagacatcaccaagcacacgttttacaaacagcccatgttctaccaccttggccacttcaggtgagtggagggcgggcacccccattccataccaggcctatcatctcctacatcggatggcttacatcactctacaccacgagggagcaggaaggtgttcagggtggaacctcggaagaggcacacccatccccttttgcaccatggaggcaggaagtgactaggtagcaacagaaaaccccaatgcctgaggctggactgcgatgcagaaaagcagggtcagtgcccagcagcatggctccaggcctagagagccagggcagagcctttgcaggagttatggggtgggtccgtgggtgggcgacttcttagatgagggtttcatgggaggtaccccgagggactctgaccatctgttcccacattcagcaagttcattcctgagggctcccagagagtggggctggttgccagtcagaagaacgacccggacgcagtggcactgatgcatcccgatggctctcctgttgtggtcgtcctaaaccggtgagggcaatggtgaggtctgggaagtgggctgaagacagcgttgggggccttggcaggatcacactctcagcttctcctccctgctccctagctcctctaaggatgtgcctcttaccatcaaggatcctgctgtgggcttcctggagacaatctcacctggctactccattcacacctacctgtggcgtcgccagtgatggagcagatactcaaggaggcactgggctcagcctgggcattaaagggacagagtcagctcacacgctgtctgtgactaaagagggcacaacagggccagtgtgagcttacagcgacgtaagcccaggggcaatggtttgggtgactcactttcccctctaggtggtgcccagggctggaggcccctagaaaaagatcagtaagccccagtgtccccccagcccccatgcttatgtgaacatgcgctgtgtgctgcttgctttggaaactggcctgggtccaggcctagggtgagctcactgtccgtacaaacacaagatcagggctgagggtaaggaaaagaagagactaggaaagctgggcccaaaactggagactgtttgtctttcctggagatnnnnnnctgggcccgtggagcagcagtgtcagcatcagggcggaagccttaaagcagcagcgggtgtgcccaggcacccagatgattcctatggcaccagccaggaaaaatggcagctcttaaaggagaaaatgtttgagcccagtcagtgtgagtggctttattctgggtggcagcacccgtgtccggctgtaccaacaacgaggagcacgggggcctctggaagtcatgagagtagaaaaaccagtcttggggagt

SEQ ID NO: 285 - DNA, 1196 bp, Homo sapiens
gacttcggttccggtctctgcagcagccgtgatcgcttagtggagtgcttagggtagttggccaggatgccgaatatcaaaatcttcagcggcagttcccaccaggacttatctcagaaaattgctgaccgcctgggcctggagctaggcaaggtggtgactaagaagttcagcaaccaggagacctgtgtggaaatcggtgaaagtgtacgtggagaggatgtctacattgttcagagtggttgtggcgaaatcaatgacaatttaatggagcttttgatcatgattaatgcctgcaagattgcttcagccagccgggttactgcagtcatcccatgcttcccttatgcccggcaggataagaaggataagagccgggcgccaatctcagccaagcttgttgcaaatatgctatctgtagcaggtgcagatcatattatcaccatggacctacatgcttctcaaattcagggcttttttgatatcccagtagacaatttgtatgcagagccggctgtcctaaagtggataagggagaatatctctgagtggaggaactgcactattgtctcacctgatgctggtggagctaagagagtgacctccattgcagacaggctgaatgtggactttgccttgattcacaaagaacggaagaaggccaatgaagtggaccgcatggtgcttgtgggagatgtgaaggatcgggtggccatccttgtggatgacatggctgacacttgtggcacaatctgccatgcagctgacaaacttctctcagctggcgccaccagagtttatgccatcttgactcatggaatcttctccggtcctgctatttctcgcatcaacaacgcatgctttgaggcagtagtagtcaccaataccatacctcaggaggacaagatgaagcattgctccaaaatacaggtgattgacatctctatgatccttgcagaagccatcaggagaactcacaatggagaatccgtttcttacctattcagccatgtccctttataatagagtaaggtattgatgacaaattcagcagaagacccggcttgctccagtgtagctttctacatcccacatcaggatattagaggttatccgaactggggaaagacggattgagattaactgctggacctcctacctgcattatctcattctggcttccttgataattctgt

SEQ ID NO: 286 - DNA, 6226 bp, Homo sapiens
cgccgcccgaggagtcgtccgacagcgagcccgaggcggagcccggctccccacagaagctcatccgcaaggtgtccacgtcgggtcagatccgacagaagaccatcatcaaagaggggatgctgaccaaacagaacaattcattccagcgatcaaaaaggagatactttaagcttcgagggcgaacgctttactatgccaaaacggcaaagtcaatcatatttgatgaggtggatctgacagatgccagcgtagctgaatccagtaccaaaaacgtcaacaacagttttacggtcataactccatgcaggaagctcatcttgtgtgctgataacagaaaagaaatggaagattggattgcagcattaaagactgtgcagaacagggagcactttgagcccacccagtacagcatggaccacttctcagggatgcacaattggtacgcctgttcccacgcgaggccgacctactgcaatgtgtgccgtgaggctctgtctggggtcacgtcgcacgggctgtcctgcgaggtgtgcaaatttaaggcccacaagcgctgtgctgtgcgtgcaaccaataactgcaagtggaccacactggcctcgatcgggaaggacatcattgaagatgcagatgggattgcaatgccccaccagtggttggaaggaaacctacctgtgagcgccaagtgcactgtgtgcgacaagacctgtggcagtgtgctgcgcctgcaggactggcgctgcctctggtgcaaggccatggttcacacatcgtgtaaagaatccttgctgaccaagtgcccacttggcctgtgcaaagtgtcagtcatcccacccacggctctcaacagcatcgactccgatgggttctggaaggccagctgtcctccttcttgcacaagcccactgttggtcttcgtcaattcaaaaagtggggacaaccagggtgtgaagttcctcagaagattcaaacagctactaaaccccgcccaggtcttcgacctcatgaacggaggcccacacctcggcttacggttattccagaagtttgacacattccggattctggtttgtggcggggatggaagtgttggctgggtcctctccgaaatcgacagcctcaaccttcataaacagtgtcagctgggagtgctgccgctcggcacagggaacgacttggcccgagtactgggctggggctcagcctgcgatgacgacacccagctcccccagatcttggagaagttggagagagccagcaccaagatgctggacaggtggagcgtcatggcatacgaggccaagctcccccggcaggcctcctcctctaccgtcaccgaagacttcagcgaggattccgaggtacagcagattctcttctatgaagactcggttgcagcccacctttctaaaatcctcacctcggaccagcactcggtggtcatctcctcggccaaagtgctctgtgagacggtgaaggacttcgtggcacgggtggggaaggcctatgagaagacgaccgagagctcggaggagtcagaggtcatggccaagaagtgctctgtcctgaaagagaagctggattcccttctcaagaccttggacgatgagtcccaggcctcgtcctctctgcccaacccgccccccaccattgccgaggaggctgaagatggagatgggtcgggcagcatctgcggttccaccggagaccgcttggtggcatcagcttgcccggcccggccgcagatattccggcctcgagaacagctcatgctgagagccaacagcctgaagaaagcaattcgtcagatcatagaacacacagaaaaagctgtcgatgagcagaatgcccagacccaggagcaggagggcttcgtcctgggcctctctgagtcagaggagaagatggaccacagagtgtgcccaccactgtcccacagcgagagcttcggggtccccaaggggaggagccagcgcaaagtgtcgaaatctccgtgtgaaaagctgatcagcaaagggagtctgtccctaggcagttctgcttcccttccgccccagccgggaagccgggacggcttgcctgcgctcaacaccaagatcctgtacccaaatgtccgggctggaatgtctggttccttacccggtggctcagtcatcagtcgcctgttaattaatgctgatcccttcaactctgaaccagaaaccctagagtattacacggagaaatgtgtcatgaacaactattttggcattggcctggatgcgaagatatccctggactttaacaacaagcgcgatgagcacccagagaagtgcaggagccgaaccaagaacatgatgtggtatggagttcttggaaccaaagagttgctgcacagaacctacaagaacctggagcaaaaggtcttgctggagtgtgacgggcgacccatcccactccccagtcttcagggaattgctgtccttaacattcccagctatgccggaggaaccaacttctgggggggtaccaaggaagatgatactttcgcagctccatcattcgatgacaagattctggaggtggtcgccgtgttcggcagcatgcagatggccgtctctcgagtcatcaggctacagcatcatcggatcgcccagtgtcgcacggtgaagatctccatccttggggatgagggcgtgcctgtgcaggtggacggagaggcctgggtccagccgccagggtacattcggattgtccacaagaaccgggcacagacactgaccagagacagggcatttgagagcaccctgaagtcctgggaagacaagcagaagtgcgagctgccccgccctccatcctgttccctgcacccggagatgctgtccgaggaggaggccacccagatggaccagtttgggcaggcagcaggggtcctcattcacagtatccgagaaatagctcagtctcaccgggacatggagcaggaactggcccacgccgtcaatgccagctccaagtccatggaccgtgtgtatggcaagcccagaaccacagaggggctcaactgcagcttcgtcctggaaatggtgaataacttcagagctctgcgcagtgagacggagctgctgctgtctgggaagatggccctgcagctggatccgcctcagaaggagcagctggggagtgctcttgccgagatggaccgacagctcaggaggctggcagacaccccgtggctctgccagtccgcagagcccggcgacgaagagagtgtgatgctggatcttgccaagcgcagtcgcagtggtaaattccgcctcgtgaccaagtttaaaaaggagaaaaacaacaagaacaaagaagctcacagtagcctgggagccccggttcacctctgggggacagaggaggttgctgcctggctggagcacctcagtctctgtgagtataaggacatcttcacacggcacgacatccggggctctgagctcctgcacctggagcggagggacctcaaggacctgggcgtgaccaaggtgggccacatgaagaggatcctgtgtggcatcaaggagctgagccgcagcgcccccgccgtcgaggcctagcctctgtcctctcagcctgtggcctccacatccccgccgccgaggcctagcctccgccctctcagcctgtggcctctgcgcctcctgccactgaggccctgggcagatgctgcagcccgcccccttctcatggtgctacttcctctgtcagctacagaaagcctccgtgacaccgtccaccagagctctggggtctcgaacataacaacacagctacctttgaaacaacactttctccagctcagagtcacctggggcacatgtgtcacggccactcagctctcgcccgcctgtgctgtgggccagggaatccagcggcgtctggcctcctgggcactgcttgcctggcctcgtgcttggattgtcccgggggctcctctccgtgtgtccttctgtggccgcaccgtgtggctccgcctcctggcccccagccagttctcagaaacgtggctggggcccagcacagcagcctgcaagggcccctgtttgttgatgcagcttttgttgaacaaaaatcgtgctctttcctggtttgaaagtagcatggatgtttccagtcttgttgattgtaatttgacgtgaagagaaaaaaaaattcctcctgcgtgagccaaggcagcgggtgctgtttcccaggcggggagcccctccctgggtgtcacagggcctgtgctcctccctcctccatcctctctcctcccgctcctccctccccccactgtgggctggggacgcctgcccttctgtctccggacgctctaggcgagttcagcttggggtgtgagtgagacagctcgccagctgcatccctgcagacagaggatgtgtgtccacatgagtgtttctgtgtgggaaatgcttcctggctctgggaaactttttctgcccattctgtggttcccagggagcgtggccctggtgggccaggggtggtttgacctcttcagcccgtccggtggcctggaggccggaggctctcctgagtgtctgcccctgcagtggcttcttgtcgcctgctgctgggcgtgatgtcgctggaggtgctggcagggactctgatttggtggtccgcgctgcccctgccctgcctctgtcctggctctgaactagtagatgatggtgccagagggcagggagctcgcctggggagagggctgtgccccgtagggacagtgcccaggtgaaggatgcccctggtcctccagggcactgactttgcccttttttcccgttgatagtcatggctcagaggtgcttgtaaatgtcttgggaagaggtttctgtaacccctgccctggtgtgaggaggaaatggctctggcctggctgcctggccgtggcttctctttggctcccaaagagaaggacagtgttgggagtatctgccgtggcttctctttggctcccaaagagaaggacagtgttgggagtatctgccggcgctgtccaggtcctttagtcagcgtcactccatctgatgtgcagaagctgggctgcacctgcgggggtgggcatagaccgggctgggtctgcagcagcccctggtcctgagcaggcggcagtgaacagcactggcccacctcccactcacagcccctctgtcccctctgcagtgcacccaggtgggcccctctgcgtgcctttgggtgctcccctctcgtggtcgttctggcccgaggcccttagagtatggaggctgagccaggccttgggtttccccagcacagcctcctgtcgctgcatgcgacgtgttgggatttttggatgaaagactctcccacgctctgttggtggacttagctgcctcactggaagtgatgtgggtggaaggtggttgtatgttaccttttccacctctcattgttttccccagaacattgtagatgggggttggcagagggagaaataagccagccacggcagtcgcttggtttcccaggtggaatgggctaacacaggagatgatgggaacctgtcccgcagtccctgcatgaccattggccctgctggcctggcgatgtgggcatcctggggttcttagggtcccagaacaagccccaggcaagctggaacttgggtggggaggggacatgaggaggataaacagctgactgtggcttcaaggacatcagggccaccccaagtcctcagtgtcctactcctggcaaggagttgggtttggatcaaaagtgtttaaaattaatatgttgtcagtgattagaacaacactgtttacataaaaaccatttttctaattctaacaagttagaatgtgaggaaggaatgaacatgagtgtttaggaacctgccctttggtgctgggctggcgtcccgcactggggtgtcctcgctgtctgggggctgctctgctgcccggcccaggtccccttgtggtgttgccagacgggcctcatggtctgctgtgcagagagaggcaggaaggatccctgaagagtcttggagaaaaggttctgtgccctcaggtggggcttaccccctcgtatttataatcttaatttatatagtgaccaccgtggaaacaaacgcctcttgtattgtcatgtacatagtccatacctgagtgctgtacataagttgttctgtgtataaataaaacaagcctgtttttgatcttcc

SEQ ID NO: 287 - DNA, 13747 bp, Homo sapiens
ggatccgccaaggactttgattattgcgtgaaagtgctgactgccaggacaggaagctagctaagatgcaagttcccagcctagagcagtggcctctggggggtctagggcggacccaagggcaaggccagggtggcagcagcttggggactctggctggctccctcccctgacactggctgaagcccaggtggtctctaacccctcccatctctccctctcatcttccccagggcatctcctcccaaccaggcaactccccgagtggcacagtggtgtgaagccatggatatcgggcccccccaaccccatgcccccagcctcctagccataaccctccctgctgacctcacagatcaacgtattaacaagactaaccatgatggatggactgctccagtccccccacctgcacaaaatttgggggccccccagactggcccggacacgggcgatgtaatagcccttgtggcctcagccttgtcccccacccactgccaagtacaatgacctcttcctctgaaacatcagtgttaccctcatccctgtccccagcatgtgactggtcactcctggggagacactccccgcccctgccacaagagccccaggtctgcagtgtgcccctcagttgagtgggcagggccgggggtggtccagccctcgcccggcccccaccccagctgcccttgctattgtctgtgcttttgaagagtgttaaattatggaagcccctcaggttcctccctgtcccgcaggacctcttatttatactaaagttccctgttttctcagcgggtctgtccccttcggaggagatgatgtagaggacctgtgtgtgtactctgtggttctaggcagtccgctttccccagaggaggagtgcaggcctgctcccagcccagcgcctcccaccccttttcatagcaggaaaagccggagcccagggagggaacggacctgcgagtcacacaactggtgacccacaccagcggctggagcaggaccctcttggggagaagagcatcctgcccgcagccagggcccctcatcaaagtcctcggtgttttttaaattatcagaactgcccaggaccacgtttcccaggccctgcccagctgggactcctcggtccttgcctcctagtttctcaggcctggccctctcaaggcccaggcaccccaggccggttggaggccccgacttccactctggagaaccgtccaccctggaaagaagagctcagattcctcttggctctcggagccgcagggagtgtgtcttcccgcgccaccctccaccccccgaaatgtttctgtttctaatcccagcctgggcaggaatgtggctccccggccaggggccaaggagctattttggggtctcgtttgcccagggagggcttggctccaccactttcctcccccagcctttgggcagcaggtcacccctgttcaggctctgagggtgccccctcctggtcctgtcctcaccaccccttccccacctcctgggaaaaaaaaaaaaaaaaaaaaaaaagctggtttaaagcagagagcctgagggctaaatttaactgtccgagtcggaatccatctctgagtcacccaagaagctgccctggcctcccgtccccttcccaggcctcaacccctttctcccacccagccccaacccccagccctcaccccctagcccccagttctggagcttgtcgggagcaagggggtggttgctactgggtcactcagcctcaattggccctgttcagcaatgggcaggttcttcttgaaattcatcacacctgtggcttcctctgtgctctacctttttattggggtgacagtgtgacagctgagattctccatgcattccccctactctagcactgaagggttctgaagggccctggaaggagggagcttggggggctggcttgtgaggggttaaggctgggaggcgggaggggggctggaccaaggggtggggagaaggggaggaggcctcggccggccgcagagagaagtggccagagaggcccaggggacagccagggacaggcagacatgcagccagggctccagggcctggacaggggctgccaggccctgtgacaggaggaccccgagcccccggcccggggaggggccatggtgctgcctgtccaacatgtcagccgaggtgcggctgaggcggctccagcagctggtgttggacccgggcttcctggggctggagcccctgctcgaccttctcctgggcgtccaccaggagctgggcgcctccgaactggcccaggacaagtacgtggccgacttcttgcagtggggtgagtgcctaccctcggggctcctgcagatggggtgggggtggggcagcagacagctctgggcacagaggcctggctgttgggggggggcagcatggcaggatgggcatggggagatcctcccatcctggggctcagagtgtggacctgggccctggggcaacatttctctgtcctatgccaccactctggaggggcagagtaaggtcagcagaggctagggtggctgtgactcagagccatggcttaggagtcacagcaggctaggctgccaacagcctcccatggcctctctgcaccccgcctcagggtcagggtcagggtcatgctgggagctccctctcctaggaccctccccccaaaagtgggctctatggccctctcccctggtttcctgtggcctggggcaagccaggagggccagcatggggcagctgccaggggcgcagccgacaggcaggtgttcggcgccagcctctccagctgccccaacaggtgcccaggcgctgggagggcggtgactcacgcgggccctgtgggagaaccagctttgcagacaggcgccaccagtgccccctcctctgcgatccaggagggacaactttgggttcttctgggtgtgtctccttctttagtaggttctgcacccacccccacccccagccccaaagtctcggttcctatgagccgtgtgggtcagacaccattcccgccaccccgggtccctgcgtcctttagttctcctggcccagggcctccaaccttccagctgtcccacaaaaccccttcttgcaagggctttccagggcctggggccagggctggaaggaggatgcttccgcttctgccagctgccttgtctgcccaacctcctccccaagcccaggactcgggctcactggtcactggtttctttcattcccagcaccctgctcctctggccctcatatgtctggccctcagtgactggtgtttggtttttgggctgtgtgtaacaaactgtgtgtgacacttgtttcctgtttctccgccttcccctgcttcctcttgtgtccatctctttctgacccaggcctggttcctttccctcctcctcccatttcacagatgggaaggtggcggccaagaagggccaggccattcagcctctggaaaaaccttctcccaacctcccacagcccctaatgactctcctggcctccctttagtagaggatgaagttgggttggcagggtaaactgagaccgggtggggtaggggtctggcgctcccgggaggagcactccttttgtggcccgagctgcatctcgcggcccctcccctgccaggcctggggcgggggagggggccagggttcctgctgccttaaaagggctcaatgtcttggctctctcctccctcccccgtcctcagccctggctggttcgtccctgctggcccactctcccggaaccccccggaacccctctctttcctccagaacccactgtctcctctccttccctcccctcccatacccaaccctctctccatcctgtcctccacttcttccacccccgggagagccaggcctcccctgtgccccacagtgccctgaggccacaagcctccaccccagctggtccccacccaggctgcccagtttaacattcctagtcataggaccttgacttctgagaggcctgattgtcatctgtaaataaggggtaggactaaagcactcctcctggaggactgagagatgggctggaccggagcacttgagtctgggatatgtgaccatgctacctttgtctccctgtcctgttccttcccccagccccaaatccagggttttccaaagtgtggttcaagaaccacctgcatctgaatctagaggtactggatacaaccccacgtctgggccgttacccaggacattctacatgagaacgtgggggtggggccctggctgcacctgaactgtcacctggagtcagggtggaaggtggaagaactgggtcttatttccttctccccttgttctttagggtctgtccttctgcagactccgttaccccaccctaaccatcctgcacacccttggagccctctgggccaatgccctgtcccgcaaagggcttctcaggcatctcacctctatgggagggcatttttggcccccagaaccttacacggtgtttatgtggggaagcccctgggaagcagacagtcctagggtgaagctgagaggcagagagaaggggagacagacagagggtggggctttcccccttgtctccagtgccctttctggtgaccctcggttcttttcccccaccacccccccagcggagcccatcgtggtgaggcttaaggaggtccgactgcagagggacgacttcgagattctgaaggtgatcggacgcggggcgttcagcgaggtaagccgaaccgggcgggagcctgacttgactcgtggtgggcggggcataggggttggggcgggcccttagaaattgatgaatgaccgagccttagaacctagggctgggctggaggcggggcttgggaccaatgggcgtggtgtggcaggtggggcggggccacggctgggtgcagaagcgggtggagttgggtctgggcgagcccttttgttttcccgccgtctccactctgtctcactatctcgacctcaggtagcggtagtgaagatgaagcagacgggccaggtgtatgccatgaagatcatgaacaagtgggacatgctgaagaggggcgaggtgaggggctgggcggacgtggggggctttgaggatccgcgccccgtctccggctgcagctcctccgggtgccctgcaggtgtcgtgcttccgtgaggagagggacgtgttggtgaatggggaccggcggtggatcacgcagctgcacttcgccttccaggatgagaactacctggtgagctccgggccggggggactaggaagagggacaagagcccgtgctgtcactggacgaggaggtggggagaggaagctctaggattgggggtgctgcccggaaacgtctgtgggaaagtctgtgtgcggtaagagggtgtgtcaggtggatgaggggccttccctatctgagacggggatggtgtccttcactgcccgtttctggggtgatctgggggactcttataaagatgtctctgttgcggggggtctcttacctggaatgggataggtcttcaggaattctaacggggccactgcctagggaaggagtgtctgggacctattctctgggtgttgggtggcctctgggttctctttcccagaacatctcagggggagtgaatctgcccagtgacatcccaggaaagtttttttgtttgtgtttttttttgaggggcgggggcgggggccgcaggtggtctctgatttggcccggcagatctctatggttatctctgggctggggctgcaggtctctgcccaaggatggggtgtctctgggaggggttgtcccagccatccgtgatggatcagggcctcaggggactaccaaccacccatgacgaaccccttctcagtacctggtcatggagtattacgtgggcggggacctgctgacactgctgagcaagtttggggagcggattccggccgagatggcgcgcttctacctggcggagattgtcatggccatagactcggtgcaccggcttggctacgtgcacaggtgggtgcagcatggccgaggggatagcaagcttgttccctggccgggttcttggaaggtcagagcccagagaggccagggcctggagagggaccttcttggttggggcccaccggggggtgcctgggagtaggggtcagaactgtagaagccctacaggggcggaacccgaggaagtggggtcccaggtggcactgcccggaggggcggagcctggtgggaccacagaagggaggttcatttatcccacccttctcttttcctcccgtgcagggacatcaaacccgacaacatcctgctggaccgctgtggccacatccgcctggccgacttcggctcttgcctcaagctgcgggcagatggaacggtgagccagtgccctggccacagagcaactggggctgctgatgagggatggaaggcacagagtgtgggagcgggactggatttggaggggaaaagaggtggtgtgacccaggcttaagtgtgcatctgtgtggcggagtattagaccaggcagagggaggggctaagcatttggggagtggttggaaggagggcccagagctggtgggcccagaggggtgggcccaagcctcgctctgctccttttggtccaggtgcggtcgctggtggctgtgggcaccccagactacctgtcccccgagatcctgcaggctgtgggcggtgggcctgggacaggcagctacgggcccgagtgtgactggtgggcgctgggtgtattcgcctatgaaatgttctatgggcagacgcccttctacgcggattccacggcggagacctatggcaagatcgtccactacaaggtgagcacggccgcagggagacctggcctctcccggtaggcgctcccaggctatcgcctcctctccctctgagcaggagcacctctctctgccgctggtggacgaaggggtccctgaggaggctcgagacttcattcagcggttgctgtgtcccccggagacacggctgggccggggtggagcaggcgacttccggacacatcccttcttctttggcctcgactgggatggtctccgggacagcgtgcccccctttacaccggatttcgaaggtgccaccgacacatgcaacttcgacttggtggaggacgggctcactgccatggtgagcgggggcggggtaggtacctgtggcccctgctcggctgcgggaacctccccatgctccctccataaagttggagtaaggacagtgcctaccttctggggtcctgaatcactcattccccagagcacctgctctgtgcccatctactactgaggacccagcagtgacctagacttacagtccagtgggggaacacagagcagtcttcagacagtaaggccccagagtgatcagggctgagacaatggagtgcagggggtgggggactcctgactcagcaaggaaggtcctggagggctttctggagtggggagctatctgagctgagacttggagggatgagaagcaggagaggactcctcctcccttaggccgtctctcttcaccgtgtaacaagctgtcatggcatgcttgctcggctctgggtgcccttttgctgaacaatactggggatccagcacggaccagatgagctctggtccctgccctcatccagttgcagtctagagaattagagaattatggagagtgtggcaggtgccctgaagggaagcaacaggatacaagaaaaaatgatgggcggcaggcaacgggtgggctcacgcctgtaacccccagcaatttggcaggccgaagtgggtggattgcttgagcccaggagttcgagaccagcctgggcaatgtggtgagacccccgtctctacaaaaatgttttaaaaattggttgggcgtggtggcgcatgcctgtatactcagctactagggtggccgacgtgggcttgagcccaggaggtcaaggctgcagtgagctgtgattgtgccactgcactccagcctgggcaacggagagagactctgtctcaaaaataagataaactgaaattaaaaaataggctgggctggccgggcgtggtggctcacgcctgtaatctcagcactttgggaggccgaggcgggtggatcacgaggtcagaagatggagaccagcctggccagcgtggcgaaaccccgtctctacccaaaaatataaaaaattagccaggcgtggtagagggcgcctgtaatctcagctactcaggacgctgaggcaggagaatcgcctgaacctgggaggcggaggttgcagtgagctgagattgcaccactgcactccagcctgggtaacagagcgagactccgtatcaaagaaaaagaaaaaagaaaaaatgctggaggggccactttagataacccctgagttggggctggtttggggggaacatgtaagccaagatccaaaagcagtgaggggcccgccctgacgactgctgctcacatctgtgtgtcttgcgcaggagacactgtcggacattcgggaaggtgcgccgctaggggtccacctgccttttgtgggctactcctactcctgcatggccctcaggtaagcactgccctggacggcctccaggggacacgaggctgcttgagcttcctgggtcctgctccttggcagccaatggagttgcaggatcagtcttggaacctcactgtttggggcccacagactcctaagaggccagagttggaggaccttaaatttctcagatctatgtacttcaaatgttagattgaattttaaaacctcagagtcacagactgggcttcccagaatcttgtaaccattaacttttacgtctgtagtacacagagccacaggacttcagaacttggcaaatatgaagtttagacttttacaatcagttgtaaaagaatgcaaattctttgaatcagccatataacaataaggccatttaaaagtattaatttaggcgggccgcggtggctcacgcctgtaatcctagcactttgggaggccaaggcaggtggatcatgaggtcaggagatcgagaccatcctggctaacacggtgaaaccccgtctctactaaaaatacaaaaaaattagccgggcatggtggcgggcgcttgcggtcccagctacttgggaggcgaggcaggagaatggcatgaacccgggaggcggagcttgcagtgagccgagatcatgccactgcactccagcctgggcgacagagcaagactccgtctcaaaaaaaaaaaaaaaaaagtttttatttaggccgggtgtggcggctcacgcctgtaatccagtgctttgggaggatgaggtgggtggatcactgaggtcaggagttcgagaccagcctgaccacgtggagaaacctcatctctactaaaaaacaaaattagccaggcgtggtggcatatacctgtaatcccagctactcaggaggctgaggcaggagaatcagaacccaggagggggaggttgtggtgagctgagatcgtgccattgcattccagcctgggcaacaagagtgaaacttcatctccaaaaaaaaaaaaaaaaagtactaaatttacaggctgggcatggtggctcacgcttggaatcccagcactttgggaggctgaagtggacggattgcttcagcccaggagttcaagaccagcctgagcaacataatgagaccctgtctctaccaaaaattgaaaaaatcgtgccaggcatggtggtctgtgcctgcagtcctagctactcaggagtctgaagtaggagaatcacttgagcctggagtttgaggcttcagtgagccatgatagattccagcctaggcaacaaagtgagacctggtctcaacaaaagtattaattacacaaataatgcattgcttatcacaagtaaattagaaaatacagataaggaaaaggaagttgatatctcgtgagctcaccagatgggcagtggtccctggctcacacgtgtactgacacatgtttaaatagtggagaacaggtgtttttttggtttgtttttttccccttcctcatgctactttgtctaagagaacagttggttttctagtcagcttttattactgggcaacattacacatactataccttatcattaatgaactccagcttgattctgaaccgctgcggggcctgaacggtgggtcaggattgaacccatcctctattagaacccaggcgcatgtccaggatagctaggtcctgagccgtgttcccacaggagggactgctgggttggaggggacagccacttcataccccagggaggagctgtccccttcccacagctgagtggggtgtgctgacctcaagttgccatcttggggtcccatgcccagtcttaggaccacatctgtggaggtggccagagccaagcagtctccccatcaggtcggcctccctgtcctgaggccctgagaagaggggtctgcagaaggtttagaaagagcagctcccaggggcccaaggccaggagaggggcagggcttttcctaagcagaggaggggctattggcctacctgggactctgttctcttcgctctgctgctccccttcctcaaatcaggaggtcttggaagcagctgcccctacccacaggccagaagttctggttctccaccagagaatcagcattctgtctccctccccactccctcctcctctccccagggacagtgaggtcccaggccccacacccatggaagtggaggccgagcagctgcttgagccacacgtgcaagcgcccagcctggagccctcggtgtccccacaggatgaaacagtaagttggtggaggggagggggtccgtcagggacaattgggagagaaaaggtgagggcttcccgggtggcgtgcactgtagagccctctagggacttcctcgaacagaagcagacagaaaccacggagagacgaggttacttcagacatgggacggtctctgtagttacagtggcgcattaagtaagggtgtgtgtgttgctggcgatctgagaagtcgatctttgagctgagcgctggtgaaggagaaacaagccatggaaggaaaggtgccaagtggtcaggcgagagcctccagggcaaaggccttgggcaggtgggaatcctgatttgttcctgaaaggtagtttgtctgagtcactacctgagaaggctggagaggccagcaggaaacacaacccagcacggcctgttgtcgtgtgggcactagggagctggagggattttgagcaccagagggacatagggtgtgttagtgtgtgagcaccagccctctggtgccctgtgtagatttagaggaccagactcagggatgggtctgagggaggtagagaagggagggggcttggatcattgcaggagctatggggattccagaaatgttgagggggcggaggagtaggggataaacaaggattcctagcctggaaccagtgtccaagtcctgagtcttccaggagccacaggcagccttaagcctggtccccacacacaggctgaagtggcagttccagcggctgtccctgcggcagaggctgaggccgaggtgacgctgcgggagctccaggaagccctggaggaggaggtgctcacccggcagagcctgagccgggagatggaggccatccgcacggacaaccagaacttcgccaggtcgggatcggggccggggccggggccgggatgcgggccggtggcaacccttggcatcccctctcgtccggcccggacggactcaccgtccttacctccccacagtcaactacgcgaggcagaggctcggaaccgggacctagaggcacacgtccggcagttgcaggagcggatggagttgctgcaggcagagggagccacaggtgagtccctcatgtgtccccttccccggaggaccgggaggaggtgggccgtctgctccgcggggcgtgtatagacacctggaggagggaagggacccacgctggggcacgccgcgccaccgccctccttcgcccctccacgcgccctatgcctctttcttctccttccagctgtcacgggggtccccagtccccgggccacggatccaccttcccatgtaagacccctctctttcccctgcctcagacctgctgcccattctgcagatcccctccctggctcctggtctccccgtccagatatagggctcaccctacgtctttgcgactttagagggcagaagccctttattcagccccagatctccctccgttcaggcctcaccagattccctccgggatctccctagataacctccccaacctcgattcccctcgctgtctctcgccccaccgctgagggctgggctgggctccgatcgggtcacctgtcccttctctctccagctagatggccccccggccgtggctgtgggccagtgcccgctggtggggccaggccccatgcaccgccgccacctgctgctccctgccagggtacgtccggctgcccacgcccccctccgccgtcgcgccccgcgctccacccgccccgtgccacccgcttagctgcgcatttgcggggctgggcccacggcaggagggcggatcttcgggcagccaatcaacacaggccgctaggaagcagccaatgacgagttcggacgggattcgaggcgtgcgagtggactaacaacagctgtaggctgttggggcgggggcggggcgcagggaagagtgcgggcccacctatgggcgtaggcggggcgagtcccaggagccaatcagaggcccatgccgggtgttgacctcgccctctccccgcaggtccctaggcctggcctatcggaggcgctttccctgctcctgttcgccgttgttctgtctcgtgccgccgccctgggctgcattgggttggtggcccacgccggccaactcaccgcagtctggcgccgcccaggagccgcccgcgctccctgaaccctagaactgtcttcgactccggggccccgttggaagactgagtgcccggggcacggcacagaagccgcgcccaccgcctgccagttcacaaccgctccgagcgtgggtctccgcccagctccagtcctgtgtaccgggcccgccccctagcggccggggagggaggggccgggtccgcggccggcgaacggggctcgaagggtccttgtagccgggaatgctgctgctgctgctgctgctgctgctgctgctggggggatcacagaccatttctttctttcggccaggctgaggccctgacgtggatgggcaaactgcaggcctgggaaggcagcaagccgggccgtccgtgttccatcctccacgcacccccacctatcgttggttcgcaaagtgcaaagctttcttgtgcatgacgccctgctctggggagcgtctggcgcgatctctgcctgcttactcgggaaatttgcttttgccaaacccgctttttcggggatcccgcgcccccctcctcacttgcgctgctctcggagccccagccggctccgcccgcttcggcggtttggatatttattgacctcgtcctccgactcgctgacaggctacaggacccccaacaaccccaatccacgttttggatgcactgagaccccgacattcctcggtatttattgtctgtccccacctaggacccccacccccgaccctcgcgaataaaaggccctccatctgccc

SEQ ID NO: 288 - DNA, 1805 bp, Homo sapiens
tattgtacaattacccaccactggatttgactcagagaggacccccagagggtgtctccatcttccctatttattttcagcccttgagggcttcattgtagatcaaagccaaggcccccaggaaggtgacatactcctggaagttcacctcctggtccttgttccggtccaagtcttccatcagccttgcaatttcagcatcctgcagcttctaatgtgttagaatgtgaaatccatactcagtggtgatgacaaccctggattcttccccttccccctcccaggcaatcctctctgcaagtggctctgtgctccctcatcaccaaggacccatgtcactttggcattgcttctcctcagctacttctcagttactggtcctcatttggagagatggagaccggcagcaactctgaggaggcatcagagcagtctgccgaagaagtaagtgaggaagaaatgagtgaagatgaagaacgagaaaatgaaaaccacctcttggttgttccagagtcacggttcgaccgagattccggggagagtgaagaagcagaggaagaagtgggtgagggaacgccgcagagcagcgccctgacagagggcgactatgtgcccgactcccctgccctgtcgcccatcgagctcaagcaggagctgcccaagtacctgccggccctgcagggctgccggagcgtcgaggagttccagtgcctgaacaggatcgaggagggcacctatggagtggtctacagagcaaaagacaagaaaacagatgaaattgtggctctaaagcggctgaagatggagaaggagaaggagggcttcccgatcacgtcgctgagggagatcaacaccatcctcaaggcccagcatcccaacatcgtcaccgttagagagattgtggtgggcagcaacatggacaagatctacatcgtgatgaactatgtggagcacgacctcaagagcctgatggagaccatgaaacagcccttcctgccaggggaggtgaagaccctgatgatccagctgctgcgtggggtgaaacacctgcacgacaactggatcctgcaccgtgacctcaagacgtccaacctgctgctgagccacgccggcatcctcaaggtgggtgacttcgggctggcgcgggagtacggatcccctctgaaggcctacaccccggtcgtggtgaccctgtggtaccgcgccccagagctgctgcttggtgccaaggaatactccacggccgtggacatgtggtcagtgggttgcatcttcggggagctgctgactcagaagcctctgttccccgggaagtcagaaatcgatcagatcaacaaggtgttcaaggatctggggacccctagtgagaaaatctggcccggctacagcgagctcccagcagtcaagaagatgaccttcagcagacacccctacaacaacctccgcaagcgcttcggggctctgctctcagaccagggcttcgacctcatgaacaagttcctgacctacttccccgggaggaggatcagcgctgaggacggcctcaagcatgagtatttccgcgagacccccctccccatcgacccctccatgttccccacgtggcccgccaagagcgagcagcagcgtgtgaagcggggcaccagcccgaggccccctgagggaggcctgggctacagccagctgggtgacgacgacctgaaggagacgggcttccaccttaccaccacgaaccagggggcctctgccgcgggccccggcttcagcctcaagttctgaaggtcagagtggaccccgtcatgggg

SEQ ID NO: 289 - DNA, 2462 bp, Homo sapiens
tcaacaggcaggggcagcactgcagagatttcatcatggtctcccaggccctcaggctcctctgccttctgcttgggcttcagggctgcctggctgcaggcggggtcgctaaggcctcaggaggagaaacacgggacatgccgtggaagccggggcctcacagagtcttcgtaacccaggaggaagcccacggcgtcctgcaccggcgccggcgcgccaacgcgttcctggaggagctgcggccgggctccctggagagggagtgcaaggaggagcagtgctccttcgaggaggcccgggagatcttcaaggacgcggagaggacgaagctgttctggatttcttacagtgatggggaccagtgtgcctcaagtccatgccagaatgggggctcctgcaaggaccagctccagtcctatatctgcttctgcctccctgccttcgagggccggaactgtgagacgcacaaggatgaccagctgatctgtgtgaacgagaacggcggctgtgagcagtactgcagtgaccacacgggcaccaagcgctcctgtcggtgccacgaggggtactctctgctggcagacggggtgtcctgcacacccacagttgaatatccatgtggaaaaatacctattctagaaaaaagaaatgccagcaaaccccaaggccgaattgtggggggcaaggtgtgccccaaaggggagtgtccatggcaggtcctgttgttggtgaatggagctcagttgtgtggggggaccctgatcaacaccatctgggtggtctccgcggcccactgtttcgacaaaatcaagaactggaggaacctgatcgcggtgctgggcgagcacgacctcagcgagcacgacggggatgagcagagccggcgggtggcgcaggtcatcatccccagcacgtacgtcccgggcaccaccaaccacgacatcgcgctgctccgcctgcaccagcccgtggtcctcactgaccatgtggtgcccctctgcctgcccgaacggacgttctctgagaggacgctggccttcgtgcgcttctcattggtcagcggctggggccagctgctggaccgtggcgccacggccctggagctcatggtgctcaacgtgccccggctgatgacccaggactgcctgcagcagtcacggaaggtgggagactccccaaatatcacggagtacatgttctgtgccggctactcggatggcagcaaggactcctgcaagggggacagtggaggcccacatgccacccactaccggggcacgtggtacctgacgggcatcgtcagctggggccagggctgcgcaaccgtgggccactttggggtgtacaccagggtctcccagtacatcgagtggctgcaaaagctcatgcgctcagagccacgcccaggagtcctcctgcgagccccatttccctagcccagcagccctggcctgtggagagaaagccaaggctgcgtcgaactgtcctggcaccaaatcccatatattcttctgcagttaatggggtagaggagggcatgggagggagggagaggtggggagggagacagagacagaaacagagagagacagagacagagagagactgagggagagactctgaggacatggagagagactcaaagagactccaagattcaaagagactaatagagacacagagatggaatagaaaagatgagaggcagaggcagacaggcgctggacagaggggcaggggagtgccaaggttgtcctggaggcagacagcccagctgagcctccttacctcccttcagccaagccccacctgcacgtgatctgctggccctcaggctgctgctctgccttcattgctggagacagtagaggcatgaacacacatggatgcacacacacacacgccaatgcacacacacagagatatgcacacacacggatgcacacacagatggtcacacagagatacgcaaacacaccgatgcacacgcacatagagatatgcacacacagatgcacacacagatatacacatggatgcacgcacatgccaatgcacgcacacatcagtgcacacggatgcacagagatatgcacacaccgatgtgcgcacacacagatatgcacacacatggatgagcacacacacaccaagtgcgcacacacaccgatgtacacacacagatgcacacacagatgcacacacaccgatgctgactccatgtgtgctgtcctctgaaggcggttgtttagctctcacttttctggttcttatccattatcatcttcacttcagacaattcagaagcatcaccatgcatggtggcgaatgcccccaaactctcccccaaatgtatttctcccttcgctgggtgccgggctgcacagactattccccacctgcttcccagcttcacaataaacggctgcgtctcctccgcacacctgtggtgcctgccaccc

SEQ ID NO: 290 - DNA, 1739 bp, Homo sapiens
ggggatcactgttggaaggcagctgcttgaggtccaaggcagtcagtgtcccctctcttttgcctcgggacagctggtatttatcagactcctaagaagttttccttgctccctagtagaagagagagattatgcagcgggcttttgattgatccaatgggaattacattgatctggtgtctggccttggttcttatcaagtggatcacctctaagaggcgtggagctatttcctatgacagttctgatcagactgcattatacattcgtatgctaggagatgtacgtgtaaggagccgagcaggatttgaatcagaaagaagaggttctcacccatatattgattttcgtattttccactctcaatctgaaattgaagtgtctgtctctgcaaggaatatcagaaggctactaagtttccagcgatatcttagatcttcacgcttttttcgtggtactgcggtttcaaattccctaaacattttagatgatgattataatggacaagccaagtgtatgctggaaaaagttggaaattggaattttgatatctttctatttgatagactaacaaatggaaatagtctagtaagcttaacctttcatttatttagtcttcatggattaattgagtacttccatttagatatgatgaaacttcgtagatttttagttatgattcaagaagattaccacagtcaaaatccttaccataacgcagtccacgctgcggatgttactcaggccatgcactgttacttaaaggaacctaagcttgccaattctgtaactccttgggatatcttgctgagcttaattgcagctgccactcatgatctggatcatccaggtgttaatcaacctttccttattaaaactaaccattacttggcaactttatacaagaatacctcagtactggaaaatcaccactggagatctgcagtgggcttattgagagaatcaggcttattctcacatctgccattagaaagcaggcaacaaatggagacacagataggtgctctgatactagccacagacatcagtcgccagaatgagtatctgtctttgtttaggtcccatttggatagaggtgatttatgcctagaagacaccagacacagacatttggttttacagatggctttgaaatgtgctgatatttgtaacccatgtcggacgtgggaattaagcaagcagtggagtgaaaaagtaacggaggaattcttccatcaaggagatatagaaaaaaaatatcatttgggtgtgagtccactttgcgatcgtcacactgaatctattgccaacatccagattggttttatgacttacctagtggagcctttatttacagaatgggccaggttttccaatacaaggctatcccagacaatgcttggacacgtggggctgaataaagccagctggaagggactgcagagagaacagtcgagcagtgaggacactgatgctgcatttgagttgaactcacagttattacctcaggaaaatcggttatcataacccccagaaccagtgggacaaactgcctcctggaggtttttagaaatgtgaaatggggtcttgaggtgagagaacttaactcttgactgccaaggtttccaagtgagtgatgccagccagcattatttatttccaagatttcctctgttggatcatttgaacccacttgttaattgcaagacccgaacatacagcaatatgaatttggcttt

SEQ ID NO: 291 - DNA, 3291 bp, Homo sapiens
accgggcaagcgggaaccaggtggccacccggtgtcggtttcattttcctttggaatttctgctttacagacagaacaatggcagcccgagtacttataattggcagtggaggaagggaacatacgctggcctggaaacttgcacagtctcatcatgtcaaacaagtgttggttgccccaggaaacgcaggcactgcctgctctgaaaagatttcaaataccgccatctcaatcagtgaccacactgcccttgctcaattctgcaaagagaagaaaattgaatttgtagttgttggaccagaagcacctctggctgctgggattgttgggaacctgaggtctgcaggagtgcaatgctttggcccaacagcagaagcggctcagttagagtccagcaaaaggtttgccaaagagtttatggacagacatggaatcccaaccgcacaatggaaggctttcaccaaacctgaagaagcctgcagcttcattttgagtgcagacttccctgctttggttgtgaaggccagtggtcttgcagctggaaaaggggtgattgttgcaaagagcaaagaagaggcctgcaaagctgtacaagagatcatgcaggagaaagcctttggggcagctggagaaacaattgtcattgaagaacttcttgacggagaagaggtgtcgtgtctgtgtttcactgatggcaagactgtggcccccatgcccccagcacaggaccataagcgattactggagggagatggtggccctaacacagggggaatgggagcctattgtccagcccctcaggtttctaatgatctattactaaaaattaaagatactgttcttcagaggacagtggatggcatgcagcaagagggtactccatatacaggtattctctatgctggaataatgctgaccaagaatggcccaaaagttctagagtttaattgccgttttggtgatccagagtgccaagtaatcctcccacttcttaaaagtgatctttatgaagtgattcagtccaccttagatggactgctctgcacatctctgcctgtttggctagaaaaccacaccgccctaactgttgtcatggcaagtaaaggttatcctggagactacaccaagggtgtagagataacagggtttcctgaggctcaagctctaggactggaggtgttccatgcaggcactgccctcaaaaatggcaaagtagtaactcatgggggtagagttcttgcagtcacagccatccgggaaaatctcatatcagcccttgaggaagccaagaaaggactagctgctataaagtttgagggagcaatttataggaaagacgtcggctttcgtgccatagctttcctccagcagcccaggagtttgacttacaaggaatctggagtagatatcgcagctggaaatatgctggtcaagaaaattcagcctttagcaaaagccacttccagatcaggctgtaaagttgatcttggaggttttgctggtctttttgatttaaaagcagctggtttcaaagatccccttctggcctctggaacagatggcgttggaactaaactaaagattgcccagctatgcaataaacatgataccattggtcaagatttggtagcaatgtgtgttaatgatattctggcacaaggagcagagcccctcttcttccttgattacttttcctgtggaaaacttgacctcagtgtaactgaagctgttgttgctggaattgctaaagcttgtggaaaagctggatgtgctctccttggaggtgaaacagcagaaatgcctgacatgtatccccctggagagtatgacctagctgggtttgccgttggtgccatggagcgagatcagaaactccctcacctggaaagaatcactgagggtgatgttgttgttggaatagcttcatctggtcttcatagcaatggatttagccttgtgaggaaaatcgttgcaaaatcttccctccagtactcctctccagcacctgatggttgtggtgaccagactttaggggacttacttctcacgcctaccagaatctacagccattcactgttacctgtcctacgttcaggacatgtcaaagcctttgcccatattactggtggaggattactagagaacatccccagagtcctccctgagaaacttggggtagatttagatgcccagacctggaggatccccagggttttctcatggttgcagcaggaaggacacctctctgaggaagagatggccagaacatttaactgtggggttggcgctgtccttgtggtatcaaaggagcagacagagcagattctgagggatatccagcagcacaaggaagaagcctgggtgattggcagtgtggttgcacgagctgaaggttccccacgtgtgaaagtcaagaatctgattgaaagcatgcaaataaatgggtcagtgttgaagaatggctccctgacaaatcatttctcttttgaaaaaaaaaaggccagagtggctgtcttaatatctggaacaggatcgaacctgcaagcacttatagacagtactcgggaaccaaatagctctgcacaaattgatattgttatctccaacaaagccgcagtagctgggttagataaagcggaaagagctggtattcccactagagtaattaatcataaactgtataaaaatcgtgtagaatttgacagtgcaattgacctagtccttgaagagttctccatagacatagtctgtcttgcaggattcatgagaattctttctggcccctttgtccaaaagtggaatggaaaaatgctcaatatccacccatccttgctcccttcttttaagggttcaaatgcccatgagcaagccctggaaaccggagtcacagttactgggtgcactgtacactttgtagctgaagatgtggatgctggacagattattttgcaagaagctgttcccgtgaagaggggtgatactgtcgcaactctttctgaaagagtaaaattagcagaacataaaatatttcctgcagcccttcagctggtggccagtggaactgtacagcttggagaaaatggcaagatctgttgggttaaagaggaatgaagccttttaattcagaaatggggccagtttagaaagaattatttgctgtttgcatggtggttttttatcatggacttggcccaaaagaaaaactgctaaaagacaaaaaagacctcacccttacttcatctatttttttaataaatagagactcactaaaaaaaaaaaaaaaaaaaaaaa

SEQ ID NO: 292 - DNA, 816 bp, Homo sapiens
ggggctgcgcggcggtggcggcggcgctcctcctggtgctgctgggggcccgggcccagggcggcactcgtagccccaggtgtgactgtgccggtgacttccacaagaagattggtctgttttgttgcagaggctgcccagcggggcactacctgaaggccccttgcacggagccctgcggcaactccacctgccttgtgtgtccccaagacaccttcttggcctgggagaaccaccataattctgaatgtgcccgctgccaggcctgtgatgagcaggcctcccaggtggcgctggagaactgttcagcagtggccgacacccgctgtggctgtaagccaggctggtttgtggagtgccaggtcagccaatgtgtcagcagttcacccttctactgccaaccatgcctagactgcggggccctgcaccgccacacacggctactctgttcccgcagagatactgactgtgggacctgcctgcctggcttctatgaacatggcgatggctgcgtgtcctgccccacgtaattcctagctgtcgtgggatggagggaagggcggctgggagcagagcaggggacctggggtggggcaggtgctgctggttcaggaataggaagaggggatagggaggagggagccttggccctgtgatgggtgggccccacttcaggcaaacttagatggcaaaagagcaatctggatccgccttagccagatacataagggtatttgccttcactttcagccagcattccccccagcgatcctagccagatattacagatggtaaccctcgtgccgaattcttgcc

SEQ ID NO: 293 - DNA, 1475 bp, Homo sapiens
aaagcaaatcattcaacgacccccgaccctccgacggcaggagccccccgacctcccaggcggacccgctccctccccgcgcggcgttccgggcccggcgagaggcgcgagcacagccgaggccatggaggtgacggcggaccagccgcgctgggtgagccaccaccaccccgccgtgctcaacgggcagcacccggacacgcaccacccgggcctcagccactcctacatggacgcggcgcagtacccgctgccggaggaggtggatgtgctttttaacatcgacggtcaaggcaaccacgtcccgccctactacggaaactcggtcagggccacggtgcagaggtaccctccgacccaccacgggagccaggtgtgccgcccgcctctgcttcatggatccctaccctggctggacggcggcaaagtcctgggcagccaccacaccgcctccccctggaatctcagccccttctccaagacgtccatccaccacggctccccggggcccctctccgtctaccccccggcctcgtcctcctccttgtcggggggccacgccagcccgcacctcttcaccttcccgcccaccccgccgaaggacgtctccccggacccatcgctgtccaccccaggctccggcggctcggcccggcaggacgagaaagagtgcctcaagtaccaggtgcccctgcccgacagcatgaagctggagtcgtcccactcccgtggcagcatgaccgccctgggtggagcctcctcgtcgacccaccaccccatcaccacctacccgccctacgtgcccgagtacagctccggactcttcccccccagcagcctgctgggcggctcccccaccggcttcggatgcaagtccaggcccaaggcccggtccagcacaggcagggagtgtgtgaactgtggggcaacctcgaccccactgtggcggcgagatggcacgggacactacctgtgcaacgcctgcgggctctatcacaaaatgaacggacagaaccggcccctcattaagcccaagcgaaggctgtctgcagccaggagagcagggacgtcctgtgcgaactgtcagaccaccacaaccacactctggaggaggaatgccaatggggaccctgtctgcaatgcctgtgggctctactacaagcttcacaatattaacagacccctgactatgaagaaggaaggcatccagaccagaaaccgaaaaatgtctagcaaatccaaaaagtgcaaaaaagtgcatgactcactggaggacttccccaagaacagctcgtttaacccggccgccctctccagacacatgtcctccctgagccacatctcgcccttcagccactccagccacatgctgaccacgcccacgccgatgcacccgccatccagcctgtcctttggaccacaccacccctccagcatggtcaccgccatgggttagagccctgctcgatgctcac

SEQ ID NO: 294 - DNA, 1283 bp, Homo sapiens
ctctctgctcctcctgttcgacagtcagccgcatcttcttttgcgtcgccagccgagccacatcgctcagacaccatggggaaggtgaaggtcggagtcaacggatttggtcgtattgggcgcctggtcaccagggctgcttttaactctggtaaagtggatattgttgccatcaatgaccccttcattgacctcaactacatggtttacatgttccaatatgattccacccatggcaaattccatggcaccgtcaaggctgagaacgggaagcttgtcatcaatggaaatcccatcaccatcttccaggagcgagatccctccaaaatcaagtggggcgatgctggcgctgagtacgtcgtggagtccactggcgtcttcaccaccatggagaaggctggggctcatttgcaggggggagccaaaagggtcatcatctctgccccctctgctgatgcccccatgttcgtcatgggtgtgaaccatgagaagtatgacaacagcctcaagatcatcagcaatgcctcctgcaccaccaactgcttagcacccctggccaaggtcatccatgacaactttggtatcgtggaaggactcatgaccacagtccatgccatcactgccacccagaagactgtggatggcccctccgggaaactgtggcgtgatggccgcggggctctccagaacatcatccctgcctctactggcgctgccaaggctgtgggcaaggtcatccctgagctgaacgggaagctcactggcatggccttccgtgtccccactgccaacgtgtcagtggtggacctgacctgccgtctagaaaaacctgccaaatatgatgacatcaagaaggtggtgaagcaggcgtcggagggccccctcaagggcatcctgggctacactgagcaccaggtggtctcctctgacttcaacagcgacacccactcctccacctttgacgctggggctggcattgccctcaacgaccactttgtcaagctcatttcctggtatgacaacgaatttggctacagcaacagggtggtggacctcatggcccacatggcctccaaggagtaagacccctggaccaccagccccagcaagagcacaagaggaagagagagaccctcactgctggggagtccctgccacactcagtcccccaccacactgaatctcccctcctcacagttgccatgtagaccccttgaagaggggaggggcctagggagccgcaccttgtcatgtaccatcaataaagtaccctgtgctcaacc

SEQ ID NO: 295 - DNA, 168 bp, Homo sapiens
  misc_feature (1)...(168): n=a,t,g or c
cgcccgcacgagcccgacctttccgccgcgctcaaggacacccgcgcgcagtacgagaagctggccgccatgaacatgcaaaacgctgaaggattttttgaagaacccggattcaccgtgctgaccgagagcgccgccaagaacccgangccgtgcgcgccgccaacg

SEQ ID NO: 296 - DNA, 304 bp, Homo sapiens
ctttataatatgtgcttcttaccagtcaaaaagtattataaactattagaaaagaaaatctaaaggtagaaattttaaaattcatttaacaagtaaattttacttttttttttttttttttttttttactgttcttcctcagacattcaaacgtgttttgatcaaagaagaggagtatgattctattatagtatataactcggtcttcatgcagagactgaaaacaaatattttgcagtatgcttccaccagggtaggtcaaaagtatcctttgattggaaaaatctaatgtaatgggtccacc

SEQ ID NO: 297 - DNA, 701 bp, Homo sapiens
tgctattggctaacattacagtttcgctttaaccaatgggattgcggttttgaaaaacacttattttgattggacaaagttaatatacgtttccaggactcaccactggttaaacgcacaacttcattctctaccccacttgcgttaagaagcagtgaataagcggtaggttgacagagctaccgtcttcctgtttttttcctccaattttccggcagttactcccagtcatgcccgagccctcaaagtccgctcctgccccgaagaaaggctccaagaaggcagtgacaaaggcccagaagaaggacggcaagaagcgcaagcgcagccgcaaggagagctactccgtgtacgtgtacaaggtgctgaagcaggtccaccccgacaccggtatctcgtccaaggccatgggcatcatgaactccttcgtcaatgacatcttcgagcgcatcgccggcgaggcttcccgcctggcgcattacaacaagcgctcgaccatcacctccagggagatccagacggccgtgcgcctgctgctgccaggggagctggccaagcacgcggtgtcggagggcaccaaggccgtcaccaagtacaccagttccaagtgagcccgcccaccgcggaacgttcggtcagtctcggcccacaccccaaaggctcttttcagagccactcagtcttcccaaagagaactggca

SEQ ID NO: 298 - DNA, 1953 bp, Homo sapiens
agccggaagtcatccttgctgaggctggggcaaccaccgcaggtcgagacagcaggcggctcaagtggacagccgggatggcagagcgtgcgccgctggaggagctggtgaaacttcagggagagcgcgtgcgaggcctcaagcagcagaaggccagcgccgagctgatcgaggaggaggtggcgaaactcctgaaactgaaggcacagctgggtcctgatgaaagcaaacagaaatttgtgctcaaaacccccaagggcacaagagactatagtccccggcagatggcagttcgcgagaaggtgtttgacgtaatcatccgttgcttcaagcgccacggtgcagaagtcattgatacacctgtatttgaactaaaggaaacactgatgggaaagtatggggaagactccaagcttatctatgacctgaaggatcagggcggggagctcctgtcccttcgctatgacctcactgttccttttgctcggtatttggcaatgaataaactgaccaacattaaacgctaccacatagcaaaggtatatcggcgggataacccagccatgaccggaggccgatatccgaattctatcactgtggattttgacatcgctggccagtttgatcccatgaatcctgatgcagagtccctgaagatcatgtgcgagatcctgagttcacttcagataggcaacttcctggtcaaggtaaatgatcggcgcatcctagatggaatgtttgctgtctgtggtgttcctgatagcaagttccgtaccatctgctcctcagtggacaaactagataaggtgtcctgggaggaagtaaagaatgagatggtgggagagaagggccttgcaccagaagtggctgatcgcattggggactatgtccagcaacatggtggggtttccctggtggaacaactggtccaggatcctaaactatcccaaaacaagcaggccttggagggcttgggagacctgaagttgctctttgagtacctgaccctatttggcattgatgacaaaatctcctttgacctgagccttgctcgagggctggattactacactggggtgatctatgaggcagtgctgctacagaccccagcccaggagggggaagagccctggtgtgggcagtgtggctgctggaggcgctatgatgggctagtgggcatgttcgacccccaaaggcgcaaggtcgccatgtgtggggctcagcattggggtggacggattttctccatcgtggaacagagactagaggctttggaggagaagatacggaccacggagacacaggtgcttgtggcatctgcacagaaaaagctggctagaggaaagactaaagcttgtctcagactgtgggatgctgggatcaaggctgagctgctgtacaagaagaacccaaagctactgaaccagttacagtactgtgaggaggcaggcatcccactggtggctatcatcggcgagcaggaactcaaggatggggtcatcaagctccgttcagtgacgagcagggaagaggtggatgtccgaagagaagagcttgtggaggaaatcaaaaggagaacaggccagcccctctgcatctgctgaactgaacaaactatcagaggaaaggaagtgggactggcactatttgaggttaagacaaactgcatatgtacttcaattgctttgcacttttccgtttcagcggaagacctgaagagtggtcagaacagagcctttgatttttattatggttattttattgattattactggcaaaaacggccaggtacaacacctttttcatacaaggcccaggaggcttagtccagtctgtgctcctgggctacaaggacccagcctgagatggtcccatctgcagggcccgcaccagttggagcagatacctccccaccaccaattgccaaaggtccaataaaatgcctcaaccacg

SEQ ID NO: 299 - DNA, 649 bp, Homo sapiens
tccagtacagaacctgctaaggccatcaaacctattgatcggaagtcagtccatcagatttgctctgggccagtggtactgagtctaagcactgcagtgaaggagttagtagaaaacagtctggatgctggtgccactaatattgatctaaagcttaaggactatggagtggatctcattgaagtttcagacaatggatgtggggtagaagaagaaaactttgaaggcttaactctttcagctctgaaacatcacacatgtaagattcaagagtttgccgacctaactgaagttgaaactttcggttttcagggggaagctctgagctcactgtgtgcactgagcgatgtcaccatttctacctgccacgcgtcggtgaaggttgggactcgactggtgtttgatcacgatgggaaaatcatccaggaaaccccctaccccccaccccagaggaccacagtcagcgtgaagcagttattttctacgctacctgtgcgccataaggaatttcaaaggaatattaagaagacgtgcctgcttccccttcgccttctgccgtgattgtcagtttcctgaggcctccccagccatgcttcctgtacagcctgcagaactgtgagccaattaaacctcttttcttcaataaatt

SEQ ID NO: 300 - DNA, 4003 bp, Homo sapiens
attaaacctctcgccgagcccctccgcagactctgcgccggaaagtttcatttgctgtatgccatcctcgagagctgtctaggttaacgttcgcactctgtgtatataacctcgacagtcttggcacctaacgtgctgtgcgtagctgctcctttggttgaatccccaggcccttgttggggcacaaggtggcaggatgtctcagtggtacgaacttcagcagcttgactcaaaattcctggagcaggttcaccagctttatgatgacagttttcccatggaaatcagacagtacctggcacagtggttagaaaagcaagactgggagcacgctgccaatgatgtttcatttgccaccatccgttttcatgacctcctgtcacagctggatgatcaatatagtcgcttttctttggagaataacttcttgctacagcataacataaggaaaagcaagcgtaatcttcaggataattttcaggaagacccaatccagatgtctatgatcatttacagctgtctgaaggaagaaaggaaaattctggaaaacgcccagagatttaatcaggctcagtcggggaatattcagagcacagtgatgttagacaaacagaaagagcttgacagtaaagtcagaaatgtgaaggacaaggttatgtgtatagagcatgaaatcaagagcctggaagatttacaagatgaatatgacttcaaatgcaaaaccttgcagaacagagaacacgagaccaatggtgtggcaaagagtgatcagaaacaagaacagctgttactcaagaagatgtatttaatgcttgacaataagagaaaggaagtagttcacaaaataatagagttgctgaatgtcactgaacttacccagaatgccctgattaatgatgaactagtggagtggaagcggagacagcagagcgcctgtattggggggccgcccaatgcttgcttggatcagctgcagaactggttcactatagttgcggagagtctgcagcaagttcggcagcagcttaaaaagttggaggaattggaacagaaatacacctacgaacatgaccctatcacaaaaaacaaacaagtgttatgggaccgcaccttcagtcttttccagcagctcattcagagctcgtttgtggtggaaagacagccctgcatgccaacgcaccctcagaggccgctggtcttgaagacaggggtccagttcactgtgaagttgagactgttggtgaaattgcaagagctgaattataatttgaaagtcaaagtcttatttgataaagatgtgaatgagagaaatacagtaaaaggatttaggaagttcaacattttgggcacgcacacaaaagtgatgaacatggaggagtccaccaatggcagtctggcggctgaatttcggcacctgcaattgaaagaacagaaaaatgctggcaccagaacgaatgagggtcctctcatcgttactgaagagcttcactcccttagttttgaaacccaattgtgccagcctggtttggtaattgacctcgagacgacctctctgcccgttgtggtgatctccaacgtcagccagctcccgagcggttgggcctccatcctttggtacaacatgctggtggcggaacccaggaatctgtccttcttcctgactccaccatgtgcacgatgggctcagctttcagaagtgctgagttggcagttttcttctgtcaccaaaagaggtctcaatgtggaccagctgaacatgttgggagagaagcttcttggtcctaacgccagccccgatggtctcattccgtggacgaggttttgtaaggaaaatataaatgataaaaattttcccttctggctttggattgaaagcatcctagaactcattaaaaaacacctgctccctctctggaatgatgggtgcatcatgggcttcatcagcaaggagcgagagcgtgccctgttgaaggaccagcagccggggaccttcctgctgcggttcagtgagagctcccgggaaggggccatcacattcacatgggtggagcggtcccagaacggaggcgaacctgacttccatgcggttgaaccctacacgaagaaagaactttctgctgttactttccctgacatcattcgcaattacaaagtcatggctgctgagaatattcctgagaatcccctgaagtatctgtatccaaatattgacaaagaccatgcctttggaaagtattactccaggccaaaggaagcaccagagccaatggaacttgatggccctaaaggaactggatatatcaagactgagttgatttctgtgtctgaagttcacccttctagacttcagaccacagacaacctgctccccatgtctcctgaggagtttgacgaggtgtctcggatagtgggctctgtagaattcgacagtatgatgaacacagtatagagcatgaatttttttcatcttctctggcgacagttttccttctcatctgtgattccctcctgctactctgttccttcacatcctgtgtttctagggaaatgaaagaaaggccagcaaattcgctgcaacctgttgatagcaagtgaatttttctctaactcagaaacatcagttactctgaagggcatcatgcatcttactgaaggtaaaattgaaaggcattctctgaagagtgggtttcacaagtgaaaaacatccagatacacccaaagtatcaggacgagaatgagggtcctttgggaaaggagaagttaagcaacatctagcaaatgttatgcataaagtcagtgcccaactgttataggttgttggataaatcagtggttatttagggaactgcttgacgtaggaacggtaaatttctgtgggagaattcttacatgttttctttgctttaagtgtaactggcagttttccattggtttacctgtgaaatagttcaaagccaagtttatatacaattatatcagtcctctttcaaaggtagccatcatggatctggtagggggaaaatgtgtattttattacatctttcacattggctatttaaagacaaagacaaattctgtttcttgagaagagaatattagctttactgtttgttatggcttaatgacactagctaatatcaatagaaggatgtacatttccaaattcacaagttgtgtttgatatccaaagctgaatacattctgctttcatcttggtcacatacaattatttttacagttctcccaagggagttaggctattcacaaccactcattcaaaagttgaaattaaccatagatgtagataaactcagaaatttaattcatgtttcttaaatgggctactttgtcctttttgttattagggtggtatttagtctattagccacaaaattgggaaaggagtagaaaaagcagtaactgacaacttgaataatacaccagagataatatgagaatcagatcatttcaaaactcatttcctatgtaactgcattgagaactgcatatgtttcgctgatatatgtgtttttcacatttgcgaatggttccattctctctcctgtactttttccagacacttttttgagtggatgatgtttcgtgaagtatactgtatttttacctttttccttccttatcactgacacaaaaagtagattaagagatgggtttgacaaggttcttcccttttacatactgctgtctatgtggctgtatcttgtttttccactactgctaccacaactatattatcatgcaaatgctgtattcttctttggtggagataaagatttcttgagttttgttttaaaattaaagctaaagtatctgtattgcattaaatataatatcgacacagtgctttccgtggcactgcatacaatctgaggcctcctctctcagtttttatatagatggcgagaacctaagtttcagttgattttacaattgaaatgactaaaaaacaaagaagacaacattaaaaacaatattgtttcta

SEQ ID NO: 301 - DNA, 4003 bp, Homo sapiens; identical to SEQ ID NO: 300

SEQ ID NO: 302 - DNA, 522 bp, Homo sapiens
ggagaaaaagacagaacaaagatggaagtggcctgggcccctgggggtgggtcctctctgttgtttttaatctgcaccttatagactgatgtctctttggccggagccagatctgcccctcagtgcattcgtgtgctcgcacgcgcagacatcccttctcccccatacacacatatacactcacagcctctctggcctcttcccttggggaggggccacctgtagtatttgccttgatttggtggggtacagtggatgtgaatactgtaaatagcttgtgctcagactcctctgcgtggagagggtgggtgcaggaggcagaccctccccccaaagccccctggggagatcttcctctctctatttaactgtaactgagggggatcccaggtctggggatgggggacaccttgggccacaggatactggttgcttcaggggtaccatgccccctgccctcgcctggaatcagtgttctgcatctgattaaatgtctccagaaataaagaataattctgccaa

SEQ ID NO: 303 - DNA, 269 bp, Homo sapiens
gttaaaacatttttttaaagcagtaagtttatagaaaatgttttcatttaatggaaggctggggaatgtccagcatcaacccctatggcatgcattccagtggccttctcatctgggcctggaacctttgttcagggcttaggggagaacaggccacatggcaacagccacacagtcattgccttcacacagagccacgtgtcccaaacagcatagtcatgccttgtcagctggatctaattgtcatagtcgtgctcctcctgtagact

SEQ ID NO: 304 - DNA, 271 bp, Homo sapiens
gaacccttcaggccatgctcttgggtgtctggattctgctgcttctggcatctctggcccctctgtggctgtactgctggagaatgttcccaaccaaagggaaaagagaccagaaggaaatgttggaagtgagtggaatctagccatgcctctcctgattattagtgcctggtgcttctgcaccgggcgtccctgcatctgactgctggaagaagaaccagacttaggaaaagaggctcttcaacagcccagttattctggcccatgacct

SEQ ID NO: 305 - DNA, 278 bp, Homo sapiens
gctgggaagagcttcagcagtcccatgtgcacgtccatgacttgcagagctttggccttgacaacatcaacatgacccactgtgtacatgaaggtggacggagaggtactgaggactcatcgattcgctcatctaccactcagcacgagccatccagaaggaaattgatctagggaggacaccgtagtcaccctcggtcttcctctgtctctctttctcctggcctgtggtgtccccagccttgccaccttcacctctggtcagcccagcccaggtga

SEQ ID NO: 306 - DNA, 518 bp, Homo sapiens
  misc_feature (1)...(518): n=a,t,g or c
actcaatagttgagtttggctgttgttgcaggaaaatgattataactaaaagctctctgatagtgcagagacttaccagaagacacaaggaattgtactgaagagctattacaatccaaatattgccgtttcataaatgtaataagtaatactaattcacagagtattgtaaatggtggatgacaaaagaaaatctgctctgtggaaagaaagaactgtctctaccagggtcaagagcatgaacgcatcaatagaaagaactcggggaaacatcccatcaacaggactacacacttgtatatacattcttggagaacactgcaatgttgaaaatccacgtttgctatttataaacttgtccttagattaatgtgtctggacagattgtgggagtaagtgattcttctaagaattagatacttgtcactgcctatacctgcagctggactgaatgggacttcgtatggttaatagttggttcnggataaatccatgccaattaaaggtaaagtgatgcc

SEQ ID NO: 307 - DNA, 491 bp, Homo sapiens
  misc_feature (1)...(491): n=a,t,g or c
ccaggccctgcgaggggtatcgagaggagctcactgtgggatggggttgacctctgccgcctgcctgggtatctgggcctggccatggctgtgttcttcatgtgttgattttatttgacccctggagtggtgggtctcatctttcccatctcgcctgagagcggctgagggctgcctcactgcaaatcctccccacagcgtcagtgaaagtcgtccttgtctcagaatgaccaggggccagccagtgtctgaccaaggtcaaggggcaggtgcagaggtggcagggatggctccgaagccagaaatgccttaaactgcaacgtcccgtcccttcnccacncccatcccatccccacccccagccccagcccagtcctcctaggagcaggacccgatgaagcgggcggcggtggggctgggtgccgtgttactaactctagtatgtttctgtgtcaatcgctgtgaaataagtctgaaaactttaaaaaaaa

SEQ ID NO: 308 - DNA, 260 bp, Homo sapiens
cttaccttgggtgaactaaccaaataatgaccatcgatggctcaaagagtggcttgaatatatcccatgggttatctgtatggactgactaggttattgaaaggactagccacatactagcatcttagtgcctttatctgtctttatgtcttggggttggggtaggtagataccaaatgaaacactttcaggaccttcctacctcttgcagttgttctttaatctcctttactagaggagataaatatttgcatataatg

SEQ ID NO: 309 - DNA, 169 bp, Homo sapiens
  misc_feature (1)...(169): n=a,t,g or c
cccagctgccccagccctggtctntggcgcatcttttccctcttgtcccgaagatctgcgcctctagtgccttttaaggggttcccatcatccctccctgatattgtattgaaaatattatgcacactgttcatgcttctactaatcaataaacgctttatttaaagcc

SEQ ID NO: 310 - DNA, 313 bp, Homo sapiens
ccagcagaggcggctcaggttgcccagctctgtggcctcaggactctctgcctcacccgcttcagcccagggcccctggagactgatcccctctgagtcctctgccccttccaaggacactaatgagcctgggagggtggcagggaggaggggacagcttcacccttggaagtcctggggttttcctcttccttctttgtggtttctgttttgtaatttaagaagagctattcatcactgtaattattattattttctacaataaatgggacctgtgtacaggaaaaagcgaaaaaaaaaaaaaaaaaaaacc

SEQ ID NO: 311 - DNA, 532 bp, Homo sapiens
aacaacatgatatgtgctggactggaccggggccaggacccttgccagagtgactctggaggccccctggtctgtgacgagaccctccaaggcatcctctcgtggggtgtttacccctgtggctctgccagcatccagctgtctacacccagatctgcaaatacatgtcctggatcaataaagtcatacgctccaactgatccagatgctacgctccagctgatccagatgttatgctcctgctgatccagatgcccagaggctccatcgtccatcctcttcctccccagtcggctgaactctccccttgtctgcactgttcaaacctctgccgccctccacacctctaaacatctcccctctcacctcattcccccacctatccccattctctgcctgtactgaagctgaaatgcaggaagtggtggcaaaggtttattccagagaagccaggaagccggtcatcacccagcctctgagagcagttactggggtcaccaacctgacttcctctgccactccctgctgtgtg

SEQ ID NO: 312 - DNA, 263 bp, Homo sapiens
ctgatgggtataactgacccccacagggaggcaggaaaacagccagaagccaccttgacacttttgaacatttccagttctgtagagtttattgtcaattgcttctcaagtctaaccagcctcagcagtgtgcatagaccatttccaggagggtctgtcccagatgctctgcctcccgttccaaaacccactcatcctcagcttgcacaaactggttgaacggcaggaatgaaagataaagagagatggcttttgtgataaaa

SEQ ID NO: 313 - DNA, 6252 bp, Homo sapiens
gcggggggcaatggcactgcagctctgggccctgaccctgctgggcctgctgggcgcaggtgccagcctgaggccccgcaagctggacttcttccgcagcgagaaagagctgaaccacctggctgtggatgaggcctcaggcgtggtgtacctgggggcggtgaatgccctctaccagctggatgcgaagctgcagctggagcagcaggtggccacgggcccggccctggacaacaagaagtgcacgccgcccatcgaggccagccagtgccatgaggctgagatgactgacaatgtcaaccagctgctgctgctcgaccctcccaggaagcgcctggtggagtgcggcagcctcttcaagggcatctgcgctctgcgcgccctgagcaacatctccctccgcctgttctacgaggacggcagcggggagaagtctttcgtggccagcaatgatgagggcgtggccacagtggggctggtgagctccacgggtcctggtggtgaccgcgtgctgtttgtgggcaaaggcaatgggccacacgacaacggcatcatcgtgagcactcggctgttggaccggactgacagcagggaggcctttgaagcctacacggaccacgccacctacaaggccggctacctgtccaccaacacacagcagttcgtggcggccttcgaggacggcccctacgtcttctttgtcttcaaccagcaggacaagcacccggcccggaaccgcacgctgctggcacgcatgtgcagagaagaccccaactactactcctacctggagatggacctgcagtgccgggaccccgacatccacgccgctgcctttggcacctgcctggccgcctccgtggctgcgcctggctctggcagggtgctatatgctgtcttcagcagagacagccggagcagtggggggcccggtgcgggcctctgcctgttcccgctggacaaggtgcacgccaagatggaggccaaccgcaacgcctgttacacaggcacccgggaggcccgtgacatcttctacaagcccttccacggcgatatccagtgcggcggccacgcgccgggctccagcaagagcttcccatgtggctcggagcacctgccctacccgctgggcagccgcgacgggctcagaggcacagccgtgctgcagcgtggaggcctgaacctcacggccgtgacggtcgccgccgagaacaaccacactgttgcttttctgggcacctctgatggccggatcctcaaggtgtacctcaccccagatggcacctcctcagagtacgactctatccttgtggagataaacaagagagtcaagcgcgacctggtactgtctggagacctgggcagcctgtacgccatgacccaggacaaggtgttccggctgccggtgcaggagtgcctgagctacccgacctgcacccagtgccgcgactcccaggacccctactgcggctggtgcgtcgtcgagggacgatgcacccggaaggccgagtgtccgcgggccgaggaggccagccactggctgtggagccgaagcaagtcctgcgtggccgtcaccagcgcccagccacagaacatgagccggcgggcccagggggaggtgcagctgaccgtcagccccctccctgccctgagcgaggaggacgagttgctgtgcctttttggggagtcgccgccacaccccgcccgcgtggagggcgaggccgtcatctgcaactccccaagcagcatccccgtcacaccgccaggccaggaccacgtggccgtgaccatccagctcctccttagacgaggcaacatcttcctcacgtcctaccagtaccccttctacgactgccgccaggccatgagcctggaggagaacctgccgtgcatctcctgcgtgagcaaccgctggacctgccagtgggacctgcgctaccacgagtgccgggaggcttcgcccaaccctgaggacggcatcgtccgtgcccacatggaggacagctgtccccagttcctgggacccagccccctggtgatccccatgaaccacgagacagatgtgaacttccagggcaagaacctggacaccgtgaagggttcctccctgcacgtgggcagtgacttgctcaagttcatggagccggtgaccatgcaggaatctgggaccttcgcctttcggaccccaaagctgtcccacgatgccaacgagacgctgcccctgcacctctacgtcaagtcttacggcaagaatatcgacagcaagctccatgtgaccctctacaactgctcctttggccgcagcgactgcagcctgtgccgggccgctaaccccgactacaggtgtgcgtggtgcgggggccagagcaggtgcgtgtatgaggccctgtgcaacaccacctccgagtgcccgccgcccgtcatcaccaggatccagcctgagacgggccccctgggtgggggcatccgcatcaccatcctggggtccaatttgggcgtccaagcaggggacatccagaggatctctgtggccggccggaactgctcctttcagccggaacgttactccgtgtccacccggatcgtgtgtgtgatcgaggctgcggagacgcctttcacggggggtgtcgaggtggacgtcttcgggaaactgggccgttcgcctcccaatgtccagttcaccttccaacagcccaagcctctcagtgtggagccgcagcagggaccgcaggcgggcggcaccacactgaccatccacggcacccacctggacacgggctcccaggaggacgtgcgggtgaccctcaacggcgtcccgtgtaaagtgacgaagtttggggcgcagctccagtgtgtcactggcccccaggcgacacggggccagatgcttctggaggtctcctacggggggtcccccgtgcccaaccccggcatcttcttcacctaccgcgaaaaccccgtactgcgagccttcgagccgctacgaagctttgccagtggtggccgcagcatcaacgtcacgggtcagggcttcagcctgatccagaggtttgccatggtggtcatcgcggagcccctgcagtcctggcagccgccgcgggaggctgaatccctgcagcccatgacggtggtgggtacagactacgtgttccacaatgacaccaaggtcgtcttcctgtccccggctgtgcctgaggagccagaggcctacaacctcacggtgctgatcgagatggacgggcaccgtgccctgctcagaacagaggccggggccttcgagtacgtgcctgaccccacctttgagaacttcacaggtggcgtcaagaagcaggtcaacaagctcatccacgcccggggcaccaatctgaacaaggcgatgacgctgcaggaggccgaggccttcgtgggtgccgagcgctgcaccatgaagacgctgacggagaccgacctgtactgtgagcccccggaggtgcagcccccgcccaagcggcggcagaaacgagacaccacacacaacctgcccgagttcattgtgaagttcggctctcgcgagtgggtgctgggccgcgtggagtacgacacacgggtgagcgacgtgccgctcagcctcatcttgccgctggtcatcgtgcccatggtggtcgtcatcgcggtgtctgtctactgctactggaggaagagccagcaggccgaacgagagtatgagaagatcaagtcccagctggagggcctggaggagagcgtgcgggaccgctgcaagaaggaattcacagacctgatgatcgagatggaggaccagaccaacgacgtgcacgaggccggcatccccgtgctggactacaagacctacaccgaccgcgtcttcttcctgccctccaaggacggcgacaaggacgtgatgatcaccggcaagctggacatccctgagccgcggcggccggtggtggagcaggccctctaccagttctccaacctgctgaacagcaagtctttcctcatcaatttcatccacaccctggagaaccagcgggagttctcggcccgcgccaaggtctacttcgcgtccctgctgacggtggcgctgcacgggaaactggagtactacacggacatcatgcacacgctcttcctggagctcctggagcagtacgtggtggccaagaaccccaagctgatgctgcgcaggtctgagactgtggtggagaggatgctgtccaactggatgtccatctgcctgtaccagtacctcaaggacagtgccggggagcccctgtacaagctcttcaaggccatcaaacatcaggtggaaaagggcccggtggatgcggtacagaagaaggccaagtacactctcaacgacacggggctgctgggggatgatgtggagtacgcacccctgacggtgagcgtgatcgtgcaggacgagggagtggacgccatcccggtgaaggtcctcaactgtgacaccatctcccaggtcaaggagaagatcattgaccaggtgtaccgtgggcagccctgctcctgctggcccaggccagacagcgtggtcctggagtggcgtccgggctccacagcgcagatcctgtcggacctggacctgacgtcacagcgggagggccggtggaagcgcgtcaacacccttatgcactacaatgtccgggatggagccaccctcatcctgtccaaggtgggggtctcccagcagccggaggacagccagcaggacctgcctggggagcgccatgccctcctggaggaggagaaccgggtgtggcacctggtgcggccgaccgacgaggtggacgagggcaagtccaagagaggcagcgtgaaagagaaggagcggacgaaggccatcaccgagatctacctgacgcggctgctctcagtcaagggcacactgcagcagtttgtggacaacttcttccagagcgtgctggcgcctgggcacgcggtgccacctgcagtcaagtacttcttcgacttcctggacgagcaggcagagaagcacaacatccaggatgaagacaccatccacatctggaagacgaacagcttaccgctccggttctgggtgaacatcctcaagaacccccacttcatctttgacgtgcatgtccacgaggtggtggacgcctcgctgtcagtcatcgcgcagaccttcatggatgcctgcacgcgcacggagcataagctgagccgcgattctcccagcaacaagctgctgtacgccaaggagatctccacctacaagaagatggtggaggattactacaaggggatccggcagatggtgcaggtcagcgaccaggacatgaacacacacctggcagagatttcccgggcgcacacggactccttgaacaccctcgtggcactccaccagctctaccaatacacgcagaagtactatgacgagatcatcaatgccttggaggaggatcctgccgcccagaagatgcagctggccttccgcctgcagcagattgccgctgcactggagaacaaggtcactgacctctgacctacaatctccagtgctgccttgggacataggtacctgaggtacctgagagcccctcaggggaggaggccgagtggctgtggctgaggcccccaccctcccctggaacgcgccccaagccggagtgggtgcagccggaacccgcccagcgtctagactgtagcatcttcctctgagcaataccgccgggcaccgcaccagcaccagccccagccccagctccctccggccgcagaaccagcatcgggtgttcactgtcgagtctcgagtgatttgaaaatgtgccttacgctgccacgctgggggcagctggcctccgcctccgcccacgcaccagcagccgcctccatgccctaggttgggcccctgggggatctgagggcctgtggcccccagggcaagttcccagatcctatgtctgtctgtccaccacgagatgggaggaggagaaaaagcggtacgatgccttcctgacctcaccggcctccccaagggtgccggcactctgggtggactcacggctgctgggccccacgtcaaaggtcaagtgagacgtaggtcaagtcctacgtcggggcccagacatcctggggtcctggtctgtcagacaggctgccctagagccccacccagtccggggggactgggagcagttccaagaccaccccacccctttttgtaaatcttgttcattgtaaatcaaatacagcgtctttttcactccg

SEQ ID NO: 314 - DNA, 2922 bp, Homo sapiens
ggacaccgggccatgcacgcccccaactgaagctgcatctcaaagccgaagattccagcagcccaggggatttcaaagagctcagactcagaggaacatctgcggagagacccccgaagccctctccagggcagtcctcatccagacgctccgctagtgcagacaggagcgcgcagtggccccggctcgccgcgccatggagcggatccccagcgcgcaaccaccccccgcctgcctgcccaaagcaccgggactggagcacggagacctaccagggatgtaccctgcccacatgtaccaagtgtacaagtcaagacggggaataaagcggagcgaggacagcaaggagacctacaaattgccgcaccggctcatcgagaaaaagagacgtgaccggattaacgagtgcatcgcccagctgaaggatctcctacccgaacatctcaaacttacaactttgggtcacttggaaaaagcagtggttcttgaacttaccttgaagcatgtgaaagcactaacaaacctaattgatcagcagcagcagaaaatcattgccctgcagagtggtttacaagctggtgagctgtcagggagaaatgtcgaaacaggtcaagagatgttctgctcaggtttccagacatgtgcccgggaggtgcttcagtatctggccaagcacgagaacactcgggacctgaagtcttcgcagcttgtcacccacctccaccgggtggtctcggagctgctgcagggtggtacctccaggaagccatcagacccagctcccaaagtgatggacttcaaggaaaaacccagctctccggccaaaggttcggaaggtcctgggaaaaactgcgtgccagtcatccagcggactttcgctcactcgagtggggagcagagcggcagcgacacggacacagacagtggctatggaggagaatcggagaagggcgacttgcgcagtgagcagccgtgcttcaaaagtgaccacggacgcaggttcacgatgggagaaaggatcggcgcaattaagcaagagtccgaagaaccccccacaaaaaagaaccggatgcagctttcggatgatgaaggccatttcactagcagtgacctgatcagctccccgttcctgggcccacacccacaccagcctcctttctgcctgcccttctacctgatcccaccttcagcgactgcctacctgcccatgctggagaagtgctggtatcccacctcagtgccagtgctatacccaggcctcaacgcctctgccgcagccctctctagcttcatgaacccagacaagatctcggctcccttgctcatgccccagagactcccttctcccttgccagctcatccgtccgtcgactcttctgtcttgctccaagctctgaagccaatcccccctttaaacttagaaaccaaagactaaactctctaggggatcctgctgctttgctttccttcctcgctacttcctaaaaagcaacaaaaaagtttttgtgaatgctgcaagattgttgcattgtgtatactgagataatctgaggcatggagagcagattcagggtgtgtgtgtgtgtgtgtgtgtgtgtgtgtatgtgcgtgtgcgtgcacatgtgtgcctgcgtgttggtataggactttaaagctccttttggcatagggaagtcacgaaggattgcttgacatcaggagacttgggggggattgtagcagacgtctgggcttttccccacccagagaatagcccccttcgatacacatcagctggattttcaaaagcttcaaagtcttggtctgtgagtcactcttcagtttgggagctgggtctgtggctttgatcagaaggtactttcaaaagagggctttccagggctcagctcccaaccagctgttaggaccccacccttttgcctttattgtcgacgtgactcaccagacgtcggggagagagagcagtcagaccgagctttctgctaacatggggaggtagcaggcactggcatagcacggtagtggtttggggaggtttccgcaggtctgctccccacccctgcctcggaagaataaagagaatgtagttccctactcaggctttcgtagtgattagcttactaaggaactgaaaatgggccccttgtacaagctgagctgccccggagggagggaggagttccctgggcttctggcacctgtttctaggcctaaccattagtacttactgtgcagggaaccaaaccaaggtctgagaaatgcggacaccccgagcgagcaccccaaagtgcacaaagctgagtaaaaagctgcccccttcaaacagaactagactcagttttcaattccatcctaaaactccttttaaccaagcttagcttctcaaaggcctaaccaagccttggcaccgccagatcctttctgtaggctaattcctcttgcccaacggcatatggagtgtccttattgctaaaaaggattccgtctccttcaaagaagttttatttttggtccagagtacttgttttcccgatgtgtccagccagctccgcagcagcttttcaagatgcactatgcctgattgctgatcgtgttttaactttttcttttcctgtttttattttggtattaagtcgttgcctttatttgtaaagctgttataaatatatattatataaatatattaaaaaggaaaatgtttcagatgtttatttgtataattacttgattcacacagtgagaaaaaatgaatgtattcctgtttttgaagagaagaataatttttttttctctagggagaggtacagtgtttatattttggagccttcctgaaggtgtaaaattgtaaatatttttatctatgagtaaatgttaagtagttgttttaaaatacttaataaaataattcttttcctgtggaag

SEQ ID NO: 315 - DNA, 371 bp, Homo sapiens
  misc_feature (1)...(371): n=a,t,g or c
gatctggttaagttgtgtagtaaagcattaggagggtcattcttgtcacaaaagtgccactaaaacagcctcaggagaataaatgacttgcttttctaaatctcaggtttatctgggctctatcatatagacaggcttctgatagtttgcaactgtaagcagaaacctacatatagttaanatcctggnctttcttggtaaacagattttaantttctgatataaancangccncaggagaattcggggatttnaggttcncngaatagcctatatatggtgcatcggntaggtcnttattgattttttgacccttttcggctttacctnatgggaagacccngttcntttttaaatnatccnggtttttg

SEQ ID NO: 316 - DNA, 276 bp, Homo sapiens
  misc_feature (1)...(276): n=a,t,g or c
gatccgctacagcaacgtgaagaagctggaaatnaagccaaagtacccgcactgcgaggagaagatggttatcatcaccaccaagagcgtgtccaggtaccgaggtcaggagcactgcctgcaccccaagctgcagagcaccaagcgcttcatcaagtggtacaacgcctggaacgngaagcgcagggtctacgaagnatagggtgaaaaacctcagaagggnaaactccaaaccngttgggagncttgtgcaaaggnctttgcagnttaaaaaaa

SEQ ID NO: 317 - DNA, 382 bp, Homo sapiens
  misc_feature (1)...(382): n=a,t,g or c
gatctctggtcagagtgaactcttgcttcctgtattcaggcagctcanagcagaaagtaaggggcagagtcatacgtgtggccaggaagtagccagggtgaagagagactcggtgcgggcagggagaatgcctgggggtccctcacctggctagggagataccgaagcctactgtggtactnaagacttctgggttcttnccttctgctaacccagggagggtcctaagaggaaggtgacttctctctgtttgtcttaagttgcactgggggatttctgacttgaggcccatctntccagccagccactgccttctttgtaatattaagtgccttgagctggaatggggaagggggncaagggtcagtctntcggggtnggn

SEQ ID NO: 318 - DNA, 344 bp, Homo sapiens
gatcaagggcaatgccaatgacatcggcatggattatgattatgccctcctggaactcaaaaagccccacaagagaaaatttatgaagattggggtgagccctcctgctaagcagctgccagggggcagaattcacttctctggttatgacaatgaccgaccaggcaatttggtgtatcgcttctgtgacgtcaaagacgagacctatgacttgctctaccagcaatgcgatgcccagccaggggccagcgggtctggggtctatgtgaggatgtggaagagacagcagcagaagtgggagcgaaaaattattggcattttttcagggcaccagtgggtggaca

SEQ ID NO: 319 - DNA, 466 bp, Homo sapiens
  misc_feature (1)...(466): n=a,t,g or c
gatcccatggctttctttactgggctctggggccccttcacctgtgtaagcagagtgctgagccatcactgtttcagcaccactgggagtctgagtgcgattcagaagatnacgcgggtacgagtggtggacaacagtgccctggggaacagcccataccatcgggctcctcgctncatccatgtctataagaagaatggagtgggcaaggtgggcgaccagatactactggccatcaagggacagaagaaaaaggcgctcattgtggggcactgcatgcctggcccccgaatgacccccagatttgactncaacancgtggtcctcattgaggncaacggggaaccctntnggngacangtattnaagacacngtncccacctaggctgtggnagggtgaagggcgagttttcccaagntggtgggccttngttnaganctttgtgttgngtttggnncnngnta

SEQ ID NO: 320 - DNA, 2409 bp, Homo sapiens
atgcggggcgtgtggccgcccccggtgtccgccctgctgtcggcgctggggatgtcgacgtacaagcgggccacgctggacgaggaggacctggtggactcgctctccgagggcgacgcataccccaacggcctgcaggtgaacttccacagcccccggagtggccagaggtgctgggctgcacggacccaggtggagaagcggctggtggtgttggtggtacttctggcggcaggactggtggcctgcttggcagcactgggcatccagtaccagacaagatccccctctgtgtgcctgagcgaagcttgtgtctcagtgaccagctccatcttgagctccatggaccccacagtggacccctgccatgacttcttcagctacgcctgtgggggctggatcaaggccaacccagtccctgatggccactcacgctgggggaccttcagcaacctctgggaacacaaccaagcaatcatcaagcacctcctcgaaaactccacggccagcgtgagcgaggcagagagaaaggcgcaagtatactaccgtgcgtgcatgaacgagaccaggatcgaggagctcagggccaaacctctaatggagttgattgagaggctcgggggctggaacatcacaggtccctgggccaaggacaacttccaggacaccctgcaggtggtcaccgcccactaccgcacctcacccttcttctctgtctatgtcagtgccgattccaagaactccaacagcaacgtgatccaggtggaccagtctggcctgggcttgccctcgagagactattacctgaacaaaactgaaaacgagaaggtgctgaccggatatctgaactacatggtccagctggggaagctgctgggcggcggggacgaggaggccatccggccccagatgcagcagatcttggactttgagacggcactggccaacatcaccatcccacaggagaagcgccgtgatgaggagctcatctaccacaaagtgacggcagccgagctgcagaccttggcacccgccatcaactggttgccttttctcaacaccatcttctaccccgtggagatcaatgaatccgagcctattgtggtctatgacaaggaataccttgagcagatctccactctcatcaacaccaccgacagatgcctgctcaacaactacatgatctggaacctggtgcggaaaacaagctccttccttgaccagcgctttcaggacgccgatgagaagttcatggaagtcatgtacgggaccaagaagacctgtcttcctcgctggaagttttgcgtgagtgacacagaaaacaacctgggctttgcgttgggccccatgtttgtcaaagcaaccttcgccgaggacagcaagagcatagccaccgagatcatcctggagattaagaaggcatttgaggaaagcctgagcaccctgaagtggatggatgaggaaacccgaaaatcagccaaggaaaaggccgatgccatctacaacatgataggataccccaacttcatcatggatcccaaggagctggacaaagtgtttaatgactacactgcagttccagacctctactttgaaaatgccatgcggtttttcaacttctcatggagggtcactgccgatcagctcaggaaagcccccaacagagatcagtggagcatgaccccgcccatggtgaacgcctactactcgcccaccaagaatgagattgtgtttccggccgggatcctgcaggcaccattctacacacgctcctcacccaaggccttaaactttggtggcataggtgtcgtcgtgggccatgagctgactcatgcttttgatgatcaaggacgggagtatgacaaggacgggaacctccggccatggtggaagaactcatccgtggaggccttcaagcgtcagaccgagtgcatggtagagcagtacagcaactacagcgtgaacggggagccggtgaacgggcggcacaccctgggggagaacatcgccgacaacgggggtctcaaggcggcctatcgggcttaccagaactgggtgaagaagaacggggctgagcactcgctccccaccctgggcctcaccaataaccagctcttcttcctgggctttgcacaggtctggtgctccgtccgcacacctgagagctcccacgaaggcctcatcaccgatccccacagcccctctcgcttccgggtcatcggctccctctccaattccaaggagttctcagaacacttccgctgcccacctggctcacccatgaacccgcctcacaagtgcgaagtctggtaaggacgaagcggagagagccaagacggaggaggggaaggggctgaggacgagacccccatccagcctccagggcattgctcagcccgcttggccacc

SEQ ID NO: 321 - DNA, 457 bp, Homo sapiens
  misc_feature (1)...(457): n=a,t,g or c
cgtcatacaatcttggagtcctgcatttggatggcatcttccctggagttcctggaaggaatcaaactttagctggtgaatatttccataaggctgcgcaaggtggacacatggaagggaccttgtggtgttctctctactatatcacaggcaacctggagacattccctagagatcctgagaaagctgttgtatgggcaaaacatgtagctgagaaaaatggctacttgggccatgtcatccgcaaaggcctcaatgcctacctgggaaggttcatgggcatgaagctttgctgtattatgttttagcagcagaaactgggaattgaagtgtcacagacaaatttagcacacatctgtgagggagaggccagacctggccaggggagatantttgggtntttaactntgttttgggagattantattaatttcntctgttttttcaaatccgatgg

SEQ ID NO: 322 - DNA, 411 bp, Homo sapiens
  misc_feature (1)...(411): n=a,t,g or c
tatccttggatgtacaaaaaattcagaaaatgatctctgtagatattctgttttattttggtcatctttagaagttatcaggaatgtgtttaaaacaagaagagaacttttctaaggaatgatacatagaaaagattttattttaaaatgagttgtaaagcttgtgtttctttgttgctgcaagctatctgcccaagttaatgcaaatggacacattttttatgtcagaaaaacacacacacacacacacacacacacacacacacacgaaaaacaaaggaaaaaaatgcttgagctttttctaacttccccttgcagtctgttgtgtgagcagcctgtttatttcntctaatattatgtcagtttattctctttaatgggantgttaaaaaatgttattcacaggagtgc

SEQ ID NO: 323 - DNA, 462 bp, Homo sapiens
  misc_feature (1)...(462): n=a,t,g or c
gctggggcttagctgggaggtggtctgaagcagacagggaatgggagaggnggatgggaagtagacagtggctggtatggctctgaggctccctggggcctgctcaagctcctcctgctccttgctgttttctgatgatttgggggcttgggagtccctttgtcctcatctgagactgaaatgtggggatccaggatggccttccttcctcttacccttcctccctcagcctgcaacctctatcctggaacctgtcctccctttctccccaactatgcatctgttgtctgctcctctgcaaaggccagccagcttnggagcagcagagaaataaacagcatttctgatgaaaaaaaaaaaaaaaaaaaccgcggccgaaagcttattnccctttaagtaaggggttaatttttagcttgggcactnggccntcgttttanaacgtcgtgaattnggaaaacc

SEQ ID NO: 324 - DNA, 2088 bp, Homo sapiens
  misc_feature (1)...(2088): n=a,t,g or c
gtatactcattaccaaaaataacaatatctgcatttcattgttttaactttgttttctttcttttcttttagtgttcctctgaacaacagggagaatatctctgatcccacctcaccattgagaaccagatttgtgtaccatttgtctgacctgtaagatatatttttttccatagtaatatagatgtggaagttaatagcttttaattttaaccttgttagtaagaatgtttttaaaaatatgttggagtataaacatttacaaacataatctgaacttttgaatacattaattcctatgttaattattaggtatcataaattcataaaactttgtcacagataaaatttagctatacattttttctaaagaaaaaatcattggcattcatagaaaggccaatttctcttaatagttcaataagtgnatttgatcttataaaaaggcaggtgtttctttggaaatgacagactccaacatcaatttttttaaaaattctccctttcttgtcactataaataacttgtttagacagatatacagttgggaataagcctaacacagtagaaattgctgtatggtgtagataaaacaatcatattatcatatcattaattatattgcttactttcaactaatatatattaaagattggaaaatcccataagctattctgtattgtagagctgcttatgtctgaaaggagtcatcccttgctgtcatgtcagagctgcaagaactaattgattttggattgaaatgtgtagtcacattttgagacagcatttgaggggattgtctaatacatatatttgcttttcagctgtaaaaaatgtgatcctacagaagtggagctggataatcagatagttactgctacccagagcaatatctgtgatgaagacagtgctacagagacctgctacacttatgacagaaacaagtgctacacagctgtggtcccactcgtatatggtggtgagaccaaaatggtggaaacagccttaaccccagatgcctgctatcctgactaatttaagtcattgctgactgcatagctctttttcttgagaggctctccattttgattcagaaagttagcatatttattaccaatgaatttgaaaccagggcttttttttttttttgggtgatgtaaaaccaactccctgccaccaaaataattaaaatagtcacattgttatctttattaggtaatcacttcttaattatatgttcatactaagtatcaaaatcttccaattatcatgctcacctgaaagaggtatgctctcttaggaatacagtttctagcattaaacaaataaacaaggggagaaaataaaactcaaggagtgaaaatcaggaggtgtaataaaatgttcctcgcattcccccccgcttttttttttttttttgactttgccttggagagccagagcttccgcattttctttactattctttttaaaaaaagtttcactgtgtagagaacatatatgcataaacataggtcaattatatgtctccattagaaaaataataattggaaaacatgttctagaactagttacaaaaataatttaaggtgaaatctctaatatttataaaagtagcaaaataaatgcataattaaaatatatttggacataacagacttggaagcagatgatacagacttctttttttcataatcaggttagtgtaagaaattgccatttgaaacaatccattttgtaactgaaccttatgaaatatatgtatttcatggtacgtattctctagcacagtctgagcaattaaatagattcataagcatatacctgtgtgaaataaattgttggaaaaaagtttccttatgttaactttctttacgtaagttaacttgttattgatgaatggtttgtaagtatgatgtaatgaagcattaatcacagaactaatacatgtacatatttgaggtggctttgccattttatacccataattaaataaaagggcaaaatcccccctgataaataccatgtttatcatggcacataaaactttatggcagtttccaaggccaattgacatatatatttaaa

SEQ ID NO: 325 - DNA, 458 bp, Homo sapiens
  misc_feature (1)...(458): n=a,t,g or c
agaagattcaaacaccatctattgagcacctacattgtgtgccaggtagtaaaataggtgctttcatacacattgtctcaattcctgtgaggtcagaattatctctgcatttgaaacttgaggaaacatgctcagagtgcaagaagcttccttgcctgagatcacctagaaaggaaccctcagagccggcaactgaatcttggtccctgtgatgtcaagcccattgctctnccactncagaacatggcctctagattaatgccaccgattcaggaacacctccgacagttttgaaatacccccatgttgccttgtttgttttttccttctgggcttcttctattacagtctctttcattgggaaggctctgttagggccaagggccaggaggctggattactggacacgggagtcccaatgtcaggattngccancattcaggatngcttggggggtt

SEQ ID NO: 326 - DNA, 1574 bp, Homo sapiens
ctctccctccttgcgcgttccgggtctcgcaagcgcctccaaggtttgtcttgaagcatagctccagctggagggtaccttttaagctgttcaaggtcaagatgaatacaaactcaaaggaggttttatccctgggtgttcaagttcccgaggcatgggaagaacttctgacaatgaaagtggaagcaaaaagtcaccttcaatggcaggaatccagactgaaacgcagtaatccactggcaagggaaatcttccgaaggcactttcgacagctgtgctaccaagagacccctggaccaagggaggctcttactcgactccaggaactttgctaccagtggttgaggccacatgtgagcacaaaggagcagattttggatctgctggtgctggagcagtttctatccattctgcccaaggagctccagggctgggtgagggaacactgtccagagagtggagaagaggctgtgattttgctggaggatctggagagagagctcgatgaaccacaacatgagatggtggcccacagacacagacaagaagtcctctgtaaagagatggtgcctctagcagagcagacaccactgacccttcagtcccagcctaaggagccacagctcacatgtgactctgctcagaagtgccattctattggagagacagatgaagtaaccaagactgaggacagagagttggtgctaaggaaagactgtcctaagatagtggaaccacatgggaaaatgtttaatgagcagacctgggaggtatcacagcaggatccctcacatggagaagttggtgaacataaggataggatagagaggcagtggggaaacctcttaggagaggggcaacacaaatgtgatgaatgtgggaagagctttactcagagctcaggtctcattcgacatcaaagaattcatactggagaaagaccttatgaatgtaatgaatgtgggaaagccttcagtcgaagttctggtctttttaatcaccgaggaatccacaatatacagaaacggtaccactgcaaggagtgtgggaaggtcttcagtcagagtgcgggtcttatccagcatcagagaatccacaaaggagaaaagccgtatcagtgcagccagtgcagtaagagctacagtcggcgttcatttctcattgaacatcagagaagccacacaggggagcgacctcaccagtgcattgaatgtgggaaaagctttaatcgacactgcaacctcattcgccatcagaagatccacacagtggctgagctggtctagggcttggctatgagcaagttttccagatcaccacccaagttgtgtggggcaggttgagactagaaaatgcctctttcttcctttctccatgaaatgtgtttgaaacaaatcctgacttaaggcccagggacttccttaaaggaaagttgggtgtttgaagctactgttttctcttttgttcactttacctctttcttactcttactagctgtgtccctcttatttataatttatttatttttttgagatggctgctaaacccttctaataatataataaatggcactg

SEQ ID NO: 327 - DNA, 480 bp, Homo sapiens; identical to SEQ ID NO: 7
  misc_feature (1)...(480): n=a,t,g or c

SEQ ID NO: 328 - DNA, 386 bp, Homo sapiens
cttaaaaccaactttccatccgagaagcctcctcagtagttactctgctcatgagacagatctgggctccaagccaggaaaggtgaacagaaaccacaagtgtccagccctcggtgctggagtggacgttaattgtcagccaccagactgtcccggcacctacagagaatgtttcacagttctggcatttaaatcctttgatagtggattgtgctgctgttagccttagtttcagtgctttacaagtctcgcttattatctcattggtatttaggtatacaaaacagttgattattcaccacgccaatatctgggtctctgtatctcatgtagaacataagaaaatgggaactaatagggaactttatttatagcatgaaaataaa

SEQ ID NO: 329 - DNA, 427 bp, Homo sapiens
  misc_feature (1)...(427): n=a,t,g or c
gataaaagcagggttggcctcagcctgtggtctgtctcatgctctccctgttcctctccccgccaccccagggcctccaagccacctctggaaatacttggctctgcccatgcacngcggaggggcgccacgtgcgagctgtggaattgggccccgtggcagagccccatcccttggggntcgtnggggatgcgcccaagcccccgagggagaggcctggggacaccaacaaatctaagccctccctagctgcttggtaactgtgtcatgaagctgccggacagacacacgtggcatctccctgggcaggagagcaggcctgcagcatgggtcctgttcccgtgtgccgtgggtggcagtggctgcacctggcactagggctgctctgtggatgtgggtnacaacggcaggaggggatgctggcctt

SEQ ID NO: 330 - DNA, 327 bp, Homo sapiens
ctggaaggaacggatgggcctctagtgacagatccagagacacacaagagcaccaaagcagctcatcccactgatgacaccacgacgctctctgagagaccatccccaagcacagacgtccagacagacccccagaccctcaagccatctggttttcatgaggatgaccccttcttctatgatgaacacaccctccggaaacgggggctgttggtcgcagctgtgctgttcatcacaggcatcatcatcctcaccagtggcaagtgcaggcagctgtcccggttatgccggaatcattgcaggtgagtccatcagaaacagggagct

SEQ ID NO: 331 - DNA, 476 bp, Homo sapiens
aggcggtggtgttcgtcttctctctcctcgattgttgcgcgctcatcttcctctcggtctacttcataattacattgtctgatttagaatgtgattacattaatgctagatcatgttgctcaaaattaaacaagtgggtaattccagaattgattggccataccattgtcactgtattactgctcatgtcattgcactggttcatcttccttctcaacttacctgttgccacttggaatatatatcgatacattatggtgccgagtggtaacatgggagtgtttgatccaacagaaatacacaatcgagggcagctgaagtcacacatgaaagaagccatgatcaagcttggtttccacttgctctgcttcttcatgtatctttatagtatgatcttagctttgataaatgactgaagctggagaagccgtggttgaagtcagcctacactacagtgcacagttgaggagccagaa

SEQ ID NO: 332 - DNA, 352 bp, Homo sapiens
  misc_feature (1)...(352): n=a,t,g or c
ctnntttttttttttagactgattctccctctgtcaccaggctggagtgcagtgggcaacagagtgagactccgtctcaaaaaaaaaaaaaaaaccaaacccgtatgttcttttaatttatactatgtatacatttttcttatattagcttagtagttcttagaaaagaaaacctcattaatttgaatcttcttatatgcaatctgngattattcagacagggtgaagctgaaatttacatttaaattataaattttaaaatgtttgcagtccaattgaatcctataaggtaagagtctagaaaaaagttattaaaaaataaacattttaagtgctttaaaacacacacttg

SEQ ID NO: 333 - DNA, 456 bp, Homo sapiens
tagttatagagctaattggcttttatttgtgatttatgaattaaagcagcaccactctacaagtacagtgatagctccccctgggcaatacaatacaagaacagtgggttttgtcaaattggaacaaggaaacagaaccacagaaataaatacattggttaacatcagattagttcaggttacttttttgtaaaagttaaagtagaggggacttctgtattatgctaactcaagtagactggaatctcctgtgttctttttttttttaaattggttttaattttttttaattggatctatcttcttccttaacatttcagttggagtatgtagcatttagcaccactggctcaatgcgctcacctaggtgagagtgtgaccaaatcttaaagcattagtgctattatcagttaccaccatttgggggcttttatcccttcatgggttatgatggtc

SEQ ID NO: 334 - DNA, 429 bp, Homo sapiens
tggagataaaaacagcgaagtcccacataccataccctacaagacacaaggtgcgcagacgagccttggtaatgtaccggcgctgcaggaagaggctgtccgccgagcctgggctgctccagctacgcggggaggcggccccattgcaaagtgcagtttctccgcggaggtggcggtgggtcagtggcagagggccatggtttccatgttaaggaagcggacgtgcatcttggtctcaatgtcgatcccctgccagatcttcaggaagtcctcgaaggtgatcccctcgtacacctgatcaggctccatcttgccccatgcacacgctggccgcctccatcatggccccgtcggcgatggagcgagcggactccttctcgatgtgagggtttcccgacagcagctcctcgaccactttacatttcgagg

SEQ ID NO: 335 - DNA, 552 bp, Homo sapiens
  misc_feature (1)...(552): n=a,t,g or c
tttttttttttttttttaaagttaaagattcttttattaataaattctccctcccctccaaactctccccaaaataaatatctcctccccgctttggggagttgggggggtctgtatcttagggccagccctcctagtgggccagcnccctagtgttaaaaataggtccctaaccccccagggtgacccccgtggtggaatttcaggacatctgagtgagtggggcctagtgtcaagtctgccccccaagtcagcctggcccccaggntcctaaggaaggagggcacccccctcccctgtgcaaatgctgcagttccttagtcagtgtcagctgttttgtgtgagccagcgtgaggctccctttctgttctggagccagaggagnggcaaccagacancttggaaggttcccctgaaccctgggcccaggctncggaggtgattcacgccccnaaaccccttgtggttggaggagcttggctccggccgcgtctgggaggcagagaantgggctctagaatggatgaatgaatgatgaatgggcnagcccgg

SEQ ID NO: 336 - DNA, 325 bp, Homo sapiens
tttttaacataagtataaatttactatccacctagtggtagctaggtaaaattgcaggcataaagataaaaaagaaatcatcaactttgtagttcctcagcttcaaacccaaacctgcaagggagaggagagacccagacgcctcagggaccaggcagataatacaaataaatgaaacaggccaggtgagagagtacaagtcttgccaaaagaagaaacccctacttagtttcaattgattgtcctcttctgaaaatgcagatcagaattgccacacattctgaccgatcgagagaggccagaaattctaattttactcgtgccg

SEQ ID NO: 337 - DNA, 401 bp, Homo sapiens
gattaagaaaagctaaatttatattaaattatcataaagtcctaaaatactgaacatagtggttaaataactccagaaagtccaatctctccagtgagtaacgttaaaaccattacacatgagcatgggagaatcgcttccattagtttaggacagagagattttgctttttacagagtaaatcagtgctcaaatagatacttcctcaaatatgtcctttctacattctgaacagcccaagtgcaataagatccttccccctttccaatcaagaaaatgccacttttctacttgctcttcctccccagacatgagtctaaggacccaaagtgctcactcctttactgcttgttaagtgtaatgtggggaggctcagaactggggctgacgctactgagagc

SEQ ID NO: 338 - DNA, 154 bp, Homo sapiens
tttttttttttttttttttagagatggaatcgcaagaattcccaggccctctttttatttacagtgataccaaaccatccacttgcaaattctttggtctcccatcagctggaattaagtaggtactgtgtatctttgagatcatgtatttgtc

SEQ ID NO: 339 - DNA, 401 bp, Homo sapiens
tttttacgaaaccaggtttattaaaatttctctacaagtcagaaacggccatctcactgttcacatatatacacgtatgtacaggaagaacctagtgtttctagctttcccggcagaaggccctgccagcccagagtccttagtcggataatgtatcacagatacaacagtcgagcaaccacgagagcgttagtgcgacagaggcctctgtcctccctcttctcaaagtcccatgattctgtcaaggtaatattgccaataatcattcacatttcacgtggttttagacacgcaggttattcagacagacacagacaacaaaacaagcctcaaagccagaacaaaacaaaacaaaaccaaatcgaacataggtataaaaggtaaaatatatgtacaaagta

SEQ ID NO: 340 - DNA, 376 bp, Homo sapiens
cacgtgaaaaaaagttttatttagggagctccagggaatgcggtgggaaaggagaggtgcagtgtcattgccgccctctcctcccacctagtgcattaatagtggatgggagcatctgacagaagtgagatcaggcagtgggtgtctgcaccccacagcgcatgttggctggaacagcaaagtctatctgctgaggtttaggcaagttcaggttgcccatgattttgacaaactcctcacagctgagggtgagccgagggttcagagtcctctcctcctccacggtggacactgtgaacccatggtaatcgtgagcagggtagatcagacagtctcctggaagtgtgaagatcttttcatggaccgagtggtaaag

SEQ ID NO: 341 - DNA, 382 bp, Homo sapiens
ttctctttgtccagttcctttattgggggcagggcaccaagaagaggccctccgctccccaaacccagaggcaaaaggggttggcacgctccctcccagcctagtccttgcgtcactgtccatgggcaattcctctgccctgcatcttcaggccatgtcaggtagaggtatccatctcagggacctcagtggacacttccgtgggcactgccagccgcctggggggcacataggatcccatacccgctgccctctccgcctcttcctgactgtagggctcgacgctcagctgcttcagccttttcttgtggtctttggatcggaagtgggtcttcaggttggtggaatcgatgaagtacctcgcgcaggccagacagcggtg

SEQ ID NO: 342 - DNA, 316 bp, Homo sapiens
ttttttttttttttttttttttttttttttttttctgttacaaacaggtctttattaaagatgagaagccaggtctttattaaagatgaggagggggcaggaaaggggggcagtgctcctctacccactgcctttgcctgcccggggtgagggagcccctctgctccacccatgccccccatgatggcacatctgtatgaggctgaggcatggggggcagtgtgaagaacaggggcaggttccaagaaaaagaagaaaaacccttcccacagccctaataaataacagaagggtttgggatgacctgggcacaggc

SEQ ID NO: 343 - DNA, 457 bp, Homo sapiens
ccagtcgggttggagtttatttctgccagagcctggaggctgggagggtaaaggacactcctttagtcccagagggaagctccgaaccctcagagcaaccagaagggagggcagagcatgggcagcagcaggagtgagaggggtccccttgtcctgcccctttgcaagggttcaaggctggtggaggcctggggcttctgtcgctcaggagttcaggggtggacgcagaaatgggggaaggagagtggctacgtagagagtgagagcgagattcctaaaaagatgcacagagagaccctcagagagaagcagagggaatgggttgcactggctgaggatggtggaggagccgtctcactcccttcctaatgtctatagatcaataacgagggaagaaaggaggacagggagctgatggaaacacagcttgccaactgtacccagtcccccaacaagc

SEQ ID NO: 344 - DNA, 283 bp, Homo sapiens
gcagccgcctcctaagaacctgctgctgggtcccggcaagcccaaggagccagctgtggtgcggccgaggagcctgtggcagcggcacatggcatgccagaggtaaaaaaacgacggcggcggaacagaagctggcatctccccagccatcctatgcagcagacgccaacgacagcaaggccgagtactcagacgtcctggccaagctggcttcctgaaccgccagagccagtgcgctggacggtgctcaccgccccgctgctggacacccagtgagccggag

SEQ ID NO: 345 - DNA, 404 bp, Homo sapiens
acatttcaaatatattttattactttccatcttagaaagaatatgaaacctgcatgcaatgctaatggtttctgacatgtacatagcatataacacagcagtacaatgcggcatatactggggggcagtgtgtggagggggcgttcttaagggtatatgtacagaggaaagggcgcatggtcatcttagctttcgaaagaggactgcactgtttaacattgaagaattacatggggaatcacaaatatattgctttagtactgcatgttctgttgtggtgagggaaagaaacatgctttgaaggttttcccttgtcaacagaatgtgtgtctgtagctgtgtattgcgcatgtattcatatatttttaagttttctcctaaggtttttgctgacagtgttggga

SEQ ID NO: 346 - DNA, 317 bp, Homo sapiens
tttggtcttttatggtcgattttgtcttttttcttcttttttccccattttttcaaggatggaaaggtcagagaaaaataaaataaaacatctttcaatagtctttcctggtaaaagcagcgtctctctgggctggggagtaaagggtgtggggcaaggggagtggggagaggctgaaaccttcccccaaaccccagttttagatcctttggtttccttctcccagaagatggcagaagggcatggtgggaacagcagggagaaaatatggtgatgacaaaccccagatgatcaaggggctgatgctcctggggccc

SEQ ID NO: 347 - DNA, 265 bp, Homo sapiens
ttttttgagctttggacaaatttattgaaacatacaggcggctgttagcagagaaatcattccatgattgatgtgttacatttggccactaccttgaatgtataatttaaaaattatatttttcacaactaagcctttggccaaaaaagtcatttagcacatctttaaagatcaataagaaatggattttggacattaaaaagatcaagtcactgaattaaacagtagcaacccccattaatctagaatcccatagtgctgaagg

SEQ ID NO: 348 - DNA, 405 bp, Homo sapiens
ttaaattaaaaaacaatttattgaaaaagagtaatgctttatacaaattcccattataaaaccccaaaatgtctattggtctgtttccaggtgtggtagaagaatataaaaagatcaaaattggataaattctattgtaacaatttcgttggtcattttgggccataaaatttttttgtaatgtttggtaactgatatccacatggaattacactcacacatcatgaagatctatgtatgtggcaaaagccatttaaattttaacttccaaaagcatatattctcaggtttggaaggcacactaaaatttattaggtccaattcctcataagacacggtggctgactttccttgtgtagtttattatgaagtaccatttccaaactaactatcctagcagcgtca

SEQ ID NO: 349 - DNA, 380 bp, Homo sapiens
ttttttttcttgttagctggatatatttctgttttttctttttttttctttttttttttttttttttttgtcacagaacactgtttgcagtagaggaaactggcattgcagtctggtggtataatggcttgtccacataaaccagtacatgttcatcctttagcgcaaaaagccctaatggcgcgtaccctattaaaattcaggacatctccaatattctctctctctgtttttctttgtcatcttttttttttttaaataaacattttcaaggtttgtccaaaagaaggccatataggttcttggctagcggaagacaattcagaacagctgttgcacacttggactgtcaccttctccaggctggcagttgatatctt

SEQ ID NO: 350 - DNA, 355 bp, Homo sapiens
aagtgcttaagatggtgtttaatacagcagggagccaagatacagtagtaggacacagtaaagaatgtggagtgtgtagatacaataaagaattcattttatgatctgccacctgttacttgacagaggagtaagttagggaaataaatgactcagttcttcatacatgcaaaggtaagttagttattacaaaagtttttgctgttgtttgtgctgaaagaaaagcatatgcatttaaacattttttaaaaaataaatcactcaataggcttaagaaaaatactttagttcatagttcattgatctgacgttttgatttaagatcaggggatgaatccaggatgaaaaccaaaga

SEQ ID NO: 351 - DNA, 481 bp, Homo sapiens
tttttttcataagtcagaatttatttcataccatctcacttatagcattttcaagtacaacattctgctcaacatcatttacacttgaaaacagaaaagcacaacttggtaaggcaccaggttacgatagtctggagagaaggccttgctcccattttggcttgtgtaatacctgggtagtttctcttgagtctgtcaagcagagaacaaggttataaaaggtccatttatacatacatggtaacaagagataacaaacagttttgaagtatgctgtatttataaattataatggtggcctacacttgtagttcagccaaagtggcattctctaaagcaaaattcttataaaatcttctctgcaataccaagctgcaagtttaacaattttttagctttgaagtgaaccaactttatatttaactcaaacacatactttaaaaacattttcggccccaaactctatgttcacgaagaaata

SEQ ID NO: 352 - DNA, 366 bp, Homo sapiens
ttttttttttttttttgagtattccagcattatttatttgatcagagtaaaatacacttcccatcactacaaactgagcacaactacagttgtctacacattcatatttttgacgtgccaacattttgcattctacatgaaacatttggtttaaacaaaatcttaagaattctctattttgtttcccatcttccctcctgttctctcccatcctccaaagatgttttatattaactgctatgagatttatttgccggtcacgtaatacggaggacagcagggaacaacacaagatttaccatgcctaggggatgaatggcaaacccaactttggctaatgtcattgagaacaacttggaagcgtga

SEQ ID NO: 353 - DNA, 534 bp, Homo sapiens
attgatataaaacagctttatttgagggtcctagtctgtgaggggtggacagataaaagaggtatttgtgatagggcatgaagaccttaagaccctgagggtgctgtgaacagggaacagtctgatatctggaaccaaagggcaaggaaaggtcctggggctgaagtggggacaaggggcaccaaaaagccagtgggggcaggtggtgctggccaaggtcagaggcggatgcaacaggccctcttctccccagggccaggctcctgtccagcctgggcactgccagagggtgatggcattggtccggatgctgttctgtctctgcttggacaccttcgcaaagatttctttcaggacagtctcaaaggctagctgcaacattggtagagtccagggctgaggtctccaggaagagcagtccattgttttcagcgaacattcgggcctcctcagtgggcacttcccgggcctggctgaggtcacttttgttaccccgagcatgacgacgatcgtggcttcagcatggtcatagag

SEQ ID NO: 354 - DNA, 318 bp, Homo sapiens
gtgaacaataaagctttttaatcacctgggtgcaggtgggctgagtccaaaaagagtcagcaaagggtggtgggattatcattagttcttgtaggtttgggataggcggtggagttaggagcaattttttgtgggcagggggtggatcttacaaagcacattctcaatggcggagagaatattacaaaataccttcttaagggtgcgggggtgcgggcgtggggtgggtggggagaatattacaaagcaccttctcaagggtggggaaggtgtattgtcacaaggtcaattgatcagttagggtggggcaggaacaaa

SEQ ID NO: 355 - DNA, 601 bp, Homo sapiens
ttttttttttttttttttttttttttttttttttttttttgagcttggcaaaccttttttattttgtgataaaaatgctttcatataaatttcatcttaactacctttagaatgaaacggaaaagtaaaaacaaagtgtgcattttccttactacgtttagtcaggaatatgcggtcattttattggttactgggtttctcatacaaacagatataatatcacttttaagagaaatgtacacaaggaagtaaccatagtaccacttattagtgggggcctctgggtacataaatgtgtcctcccaaatagtcatcatacattcaatgtattggttagggccaaaatccctaaaccacctctcaacaaaacattacacctttggtcctttattatgcaaaaattacaaattggcaaattcaataagaggatgcaatggatttgagcatcacagccaattgcttatactaaaatattttaattctcagactctctttccctcatacctttcccttccccacctcacataagaaaatgatgcttaaaacaaaacagaggaagcaattatacaaacaaaaaaacctatccccaaaggcgggcaga

SEQ ID NO: 356 - DNA, 4003 bp, Homo sapiens; identical to SEQ ID NO: 300

SEQ ID NO: 357 - DNA, 4003 bp, Homo sapiens; identical to SEQ ID NO: 300

SEQ ID NO: 358 - DNA, 237 bp, Homo sapiens
gtcagtttacacatacatcatgttaatattagaccaaggcacaaaacgtttagtgcataaacccagtttcttttaagatttagcattttattttagtctcttatcttagtttggaccacttgtacccagtactctacctactacagactatttaacttacccaacaaaatcaaaagaggttgctgaccagatttataggggacataactgtttatattatcaaagtgtttgcataac

SEQ ID NO: 359 - DNA, 195 bp, Homo sapiens
  misc_feature (1)...(195): n=a,t,g or c
ggtagtcaaagtaaaggtttatccttgcatcagaatggtttaaatcttgcaatttgcatatacaaagagttcagcaacattcactggcattataatcagagcaagatcaanttataantgtaatcaaagaaaatatgatagttgaaactgtaataacatacatacattataaagactgcacataagttaaacaca

SEQ ID NO: 360 - DNA, 358 bp, Homo sapiens
  misc_feature (1)...(358): n=a,t,g or c
gatacatatatttattatgctgtaaaaagcaacactacctgattgcatttaaaataaatgtttcccaatttcagaatacttacaacttgtagttttaagattagattcactttgggaggttttagaagcaaatacattcatagctgtgtaatccccaggaagaatctaaatctgacatcaggtcattcagtccctgccagacagacaacagcatcaaatggtcaacagctaatccagctctgcagctaaagggcagtgtcgggcagcagtggggtatagcatattaccaaagatgagaccagcaaaaacaacaatgtgtataaagctttaanttaacatgatcatatagagcgctcag

SEQ ID NO: 361 - DNA, 311 bp, Homo sapiens
acaacactgtaagttttattcagttcaaatatcacatattagatatacaataccaattaattgaaatgaacagtacaagaatacatgaagtaaatatcataacatttaagtttcgtctcacttaggcaacaagaaatgctgagtagtattattacatattcaaaccagacttaaacttcagaaacagaaggccagatgagtgacctgtatcacaggatatgacaacacatcacctatctccaaacaagaaaaagcatgattattaagtttatctacaccagcttatttattcaaatttgctcttcttatta

SEQ ID NO: 362 - DNA, 315 bp, Homo sapiens
acttccttcactagttacgacaaaatttaagaggaataacaaatacaaattttctgttaagaacggaaaggtgcaaactagcagagtcaatactggtaaccagaaggcactaatccaaacacataaatttcaaaagctggttatattatggaataccatatatactggcctttgccagtttgggatttctgcaatagcaataagcctcgtttctgtttccaattataacaacaaaaagatgagttactaatgaacattccacttacagaagtctaggctatgttgataaattgaaaacttatctagactactctg

SEQ ID NO: 363 - DNA, 267 bp, Homo sapiens
  misc_feature (1)...(267): n=a,t,g or c
aaggcttctggtagggacattttattttttggtaaagccacaatagatagaaatgccataaaaacaaacatgtaaacaaggtatcagaactttggttcactgaaacatctcacacctaaaacacctgnggtacaaaggcaccttgctaggcgctagacagctaactctgctgcagccactttgatcctagccttggggccagggatggcacaggctgaatggaagggctgggacttcagtcacacaggagtcgccctagtatggtct

SEQ ID NO: 364 - DNA, 247 bp, Homo sapiens
  misc_feature (1)...(247): n=a,t,g or c
catgccttgaggaaagctatttatttccaagatatagactgtacttttaagacaggacttttcagaagcaggaaattttagttgttgccagagaggtgtgtcaaggacacagtgaaaggagccatgcggacatggggtggaaggctttntccaacactgttacaacacttttgtaaatgagcaaaacatctttaaaaatccttataaattctttataatatgttacacatttagagacaatatttac

SEQ ID NO: 365 - DNA, 372 bp, Homo sapiens
  misc_feature (1)...(372): n=a,t,g or c
ttttttttttttcacagtgagcattaaattattattccatacagccctggccctggcccttcttgagggagtggggtttntggggtntgcccagcagggatcctgccagatgatgtccacatgagaaggcaggtgtccaacagcttcagcttcacccagtgccccccagacaaataatgacaagtccagggtcttctgatgtgtcaggccagcactccccttgctgatgggaaaaccggggctcggccagccccactgcatcccctcacatgatgatacgaggctctngcactgactcgccaatagacttgtggggcagcangctggctccgttgaggtaggagctcatcattaactattgacgtcctncac

SEQ ID NO: 366 - DNA, 501 bp, Homo sapiens
  misc_feature (1)...(501): n=a,t,g or c
tttttttttccttctgtagtcgtctttatttagagcagaattcagactcagctggtatcccccagggcaaccccaggatgggganagggctggtctgtccccacccacttctccaggatcctcccagcccccaggctgncttttccctccaactgtcagctgcttagctgctcatctggggattggagctggagcatctgtcaaggttgtctccttgacaaacagcttcctctttggaaatggcttcactcaggtcctgcaggtcatcgagcaggacagagagggacccggggaaggaagacagcagatgagcaccagacaagggaaggtgctcgtggttacagagggaaacagggttgggcacagggaaatgagggaatggggagagagggaggctctttgggtccaagctggggcatcncttaaaagaggtttaagggtntcgaaggaccncagagaacaacattcttcntgcgagatttttaagagggagttttctna

SEQ ID NO: 367 - DNA, 231 bp, Homo sapiens
ttttttttgcttttataaacattcaaccaacatgttctttaataatctcttctttaaagaacaaaataatcaagtacatggcattaagttaaatgtctctgcacatgaatttccaccttataaatctggtatattaaattgtgctgtaaatagatttgtatattttcttttttgagtactatgataggtgaaatggtatgactataaaaaggatttgtttctttttgtctc

SEQ ID NO: 368 - DNA, 292 bp, Homo sapiens
tttaatgctaaaagttaaagaaaaaaaggtactgtaaatctgacaaatgacagaattcaggtgatatttccatagcgtgattttaaaatataataatgttgatatctgagattacactcacttcagttgacatgagtttcatcatatatagaaaaagtatcaccttcaacttaaaaaaagtaaaggttaaaaggtggcacacttttaaaatacttggtggccaaggaaaggtatatagtaaaagttgtaaaccatgtgtatgttctcataactttaaatgtgaggccacatg

SEQ ID NO: 369 - DNA, 375 bp, Homo sapiens
  misc_feature (1)...(375): n=a,t,g or c
tcacgtgtgcacagcttttttacaggttacaaagtgtttcacatacatcatctcatcaattcctcacaacagccctgtgaggtaggcagggcagggggtaatgttcccatttgtacagatgtggagactgaggcccagagaggccagtgacctgcttgaggccacacagcaagtgagcagcagagctgggnaccagaggctggggtgggccccacctccagcccctggctctntccactgactgtgctgtcccccaggaggaccccagcctntgtccagagtntcagccacanccaagccaggntcccaccccttgcagtgggtgccgcctgggaagccccagaagacaggtttcccacccccattcgggaagac

SEQ ID NO: 370 - DNA, 438 bp, Homo sapiens
  misc_feature (1)...(438): n=a,t,g or c
gactttnntccccacctttatttttcatgttataaaagtgcacattcaaggaaaagtacacagaaggaaggagacacctcatgacgaccccagtatgcagtctgggacatgtnttttcaganctgattctgtgaatatttcattttttatgggtagggtcacatacatatatatttttttccttccttttgtcatttaacatcctatagcctaaatgttcttgaataatactgacaattctgtctaagtatcatttttaataggtttgtaatatcattgtgggctggccgtgggtggctcatgcctgtaatcccagcactttgggnaggccaaggtggggtgggntcatctgagggtcagggcgttcaagaccacggctgggccaacatgggngaaaccctgtncttctaggnaaaaataccacaaaaattnggccgg

SEQ ID NO: 371 - DNA, 391 bp, Homo sapiens
  misc_feature (1)...(391): n=a,t,g or c
ncagaaacattttattgacaacagttcccaacagagtctttggggtctttaagtggcaggtgcagcgtccacaggcagagtgagggctcctgaggaacctcaccccaaattccctaaccggccgaggacgcanccccaggcccctctcaggtgggcatggcagtcccggcagcaccccctctgagcagcctgctgtggggaagaagccgggccggaagcctcagtcgtggtgccagcccagctcatgctccccgccccgaggcccccagcctntgggaagcccctgcctntaagggacagctcgtgaagacacaggaacagtggttgggggtgagggtctagggaattggggcagagggtngcttnagcacanacctgacttccctgggag

SEQ ID NO: 372 - DNA, 404 bp, Homo sapiens
  misc_feature (1)...(404): n=a,t,g or c
taatctttttcttgctcaattcccttgactatttcacaatggaaataaaaaagaagttcttaggaccaaatcttctataaccttattacacaattgggttatttctattattttttaaatatatggaaaataatcttcataagttccctttctcccaaatagtatattgtaaatattcttatacaattaaagatgggtcagaaaaagaattctacaagaagtaaccctaaatgaaccctagtctacataacaaaagatgtacaatggtcagagatggcctgactgagggtgtcgggtaatttgggtaatgctggttcacaggnaatgatggttctaaggggctgcagggctgggngagagtacccgacacccctctctgtgggagggccnctttctagtnaatg

SEQ ID NO: 373 - DNA, 262 bp, Homo sapiens
ttttaagcaatgaaatattttatttgctgaaataggtataacacttaaataaaaattaaacaaatgtttaatatctccttccatgaaacagcagcagcaagagatagcaagtgttcggaagtctcttcaatccatgttattctgatgactctttgaagaaagaacttgaacctcctgcacagggggatttccttcactcatagattcccctaacttcatctcctcttttccttgggctattagtcagtcaatatgcttgtga

SEQ ID NO: 374 - DNA, 478 bp, Homo sapiens
  misc_feature (1)...(478): n=a,t,g or c
gcgaccgacacgtcctccatgtccgcgcccagccggnctcgcgccgcctgcagctccttggacagccgtgcccgcgtctcctccgccaccggggtcagttgttcctccagttccgatttgtaggccttcaactccttcatggtctcgtccatcagcgccctcagttcctgggtgacctgggagctcgagcagctcctcctgcacctgctcagacagtgtctgcacccagcgcaggtaatcccaaaagcgacccagtgccagttcccagcgctggccgctctgccactcggtctgctggcgcagtcgnggctccggctctgtctccaccgcttgctccaccttggcctggcatcctgccaggaatgtgaccagcaacgcagcccacagaaccttcatcttcctgcctgtgattggccagtcggctcctggggaaggacgtccttcaacctcgtgccgaattcttggcctcgaaggcaaa

SEQ ID NO: 375 - DNA, 429 bp, Homo sapiens
gctttcatataaaaatgtactgtagtaatcagtaagaaaaagaaacaacattggctaagtcacgaataggcatttcaccatatgtacatgataaatggccaatcaaaataaggaatggggctcattctgctggaaattaaatacattcaaacaagaacagagatccattagcaaaatgtttaaaaataatatcacagggttaccaggggtatgacaaaaatggacacttccatacacactaggtgaatatattggtgaaaatagttcagataaacatacaaccatgtatgtaaaagtatttatcatcaatgcattatttgtagtagcaaaaacaacaagcagccttgtgaaaccagtttaatgtcctcagcagggaattaataatattattgtatattcatgaaattgacaccatgtggccacacaaat

SEQ ID NO: 376 - DNA, 503 bp, Homo sapiens
aaagaattaccataagttttatttttgcttagttttattaaaaaaataaatatgtcataaagctttctttttccttagggagaaaaaaaggaacaagtctcataaacccaaataagcaatggtaaggtgtcttaacttgaaaaagattaggagtcactggtttacaagttataattgaatgaaagaactgtaacagccacagttggccatttcatgccaatggagcaaacaacaggattaactagggcaaaataaataagtgtgtggaagccctgataagtgcttaataaacagactgattcactgagacatcagtacagatacatcttgcttaaacaacacagaagttcctgaaaagttttgtgtaaatgatataaccacaaacattaccaggagagcttgggtaactgaaagaattccatggcgaattcctttggtgaacaactactttcacttttggtaaatccaggtatttgctttttataaggagtttacctagttgc

SEQ ID NO: 377 - DNA, 467 bp, Homo sapiens
  misc_feature (1)...(467): n=a,t,g or c
ctaaaattattttattttttataattttctaacacatggtgttagaaaatgaattttggcaccgtgattaagaatttcttttcaagtttaacctttacattaaaaacagtagctacaataaggatatttcaaccttacttagagaagtgataaancatcaagtcaacaagtatttttgttggagaatttttttataagcgggatagagggaagttaacatagacactcagaagaataaaatggaaattatgccaggaagataaaaaagcaaataaccctccccccaaaaaaagaataaggagcgagacaaagggcaaaacggaagaagcaaggctcaacaactttgttttcctgatataaaattcaagtacttaaaaagttttttaaaaaataattaaatgcactactcatctcaatgaaatttttcgttttccnattttccagaactttctaaaaaaggaaaccag

SEQ ID NO: 378 - DNA, 482 bp, Homo sapiens
  misc_feature (1)...(482): n=a,t,g or c
caatgtgaaaataaacatttattataaaaattagttttgacattttaaagtgaatgcagacaaggtgttttccagttcaaaaggtccattgtaagctagagaagtaaattccaaggctggcaataactgactcatattcttcacaagtggcctagacaataaggaaccattcacctcaaattcacagagccatgaatcacctctgcttccccatgaccttttccatatccttcctactctgtcttccaaccatgacacagaactgaaacatactttaaaaatctcatccttggctaggcacggtggctcacatctggtaatcccatcactttgggagggccaaggcaggcggatcaagaaggtcaggaagtttgagaccagcccgaccaacatggtggaaccctggtctccactaaaancccaaaaattaggccaggcatggtggcacgcacccgcaatcccagctactcaggngactgngg

SEQ ID NO: 379 - DNA, 252 bp, Homo sapiens
  misc_feature (1)...(252): n=a,t,g or c
tttttttgatgctgaaagaagactttaatgtgcacaaagaaacctcacattagtgacagggagacanaggaaggagggtggggaggactgaggcccagggaaaccagagctatggagacagaggccttagggaagaggagatggctgggaggaccngctgaggggtgggcgaggcagagaggcccatcccttgctgagaggagagggggtcggggcggtggcagaggcaggctcttgcagagaggagagggg

SEQ ID NO: 380 - DNA, 296 bp, Homo sapiens
  misc_feature (1)...(296): n=a,t,g or c
cngcagttgggggtggggtgttctggtttaatcatattcagagtttgagcttgaaataaccaactcaagacccacaggagactatgtcaccagataaacccagtgctagaatccaatgtccagcatcttcaaccactcaggagtgtttgctgagagaccaggtggtgcttacccacccaacaagcactttccatctttgggtttgcccaagatgtttaccataaatgaaaggggtggggaaaggattatagttgacaccaacataaattaaatatccaattccagcatatgtgaca

SEQ ID NO: 381 - DNA, 165 bp, Homo sapiens
  misc_feature (1)...(165): n=a,t,g or c
ctctttgagtaactttattttggaggagttccataagcattaggaacatacataaaatgacacaccactgttgacaatgaaaaaaaaaacagcatttgatattttccagctttttaagttaaaaaatgattcagttaaaacaaaacaaaagtttagatattttag

SEQ ID NO: 382 - DNA, 319 bp, Homo sapiens
  misc_feature (1)...(319): n=a,t,g or c
ctccactccattgttttattatgtacaaacgctacagaacgnnggggacagacacgcgtggggtaagaagggcctggtgggaggagttcacagagcagacggtgcactgggaccagnagagcagaacacaggccataactatagggcaggtngggcaggaacggggttaaaaacgagatccaagccagccagatcgcaggaggtgcgggggcgtcgtccccttctnttctccccccaaggtcacagtgcatgcaataaaatatatatataggagctagatccgtcctctgcaagggctctgaagggtccaaaactccct

SEQ ID NO: 383 - DNA, 250 bp, Homo sapiens
cttcattaaccctttattacaagtcacgctcttatagaagtatatgtggacttacgtgaaaaaatcaaatgtatccaagaataaaaaacacagcacataaagtagtatatgcattccagtgttcgcgccagagacggcgggcgcccaagtaaaagctcttctaaaacggcctgactggggcaggcgggtgcgaacggttccgggcctcaggcacagtgtgggggccgcctgcctcctccgcggcccggcg

SEQ ID NO: 384 - DNA, 170 bp, Homo sapiens
ttttggtacaaaaggtgtctttattgaggtctgggttaaaattaggcacttggccacgagcagcagcttaaatatgaggcaagcagtcaggggttagccatgcctggggtgggttggggtcatgaggctacaggcacagactgtccccaggtggacagaagtttggagca

SEQ ID NO: 385 - DNA, 281 bp, Homo sapiens
tttttttcctcaaaagtttttattctttttcatctttttaaactggcacactgcctggtatacaccgccagtaggcattcagaaaagtttcttttttttaaatacacaatttataatactgggaagatttcatttcagtgtttcccaaaacattattcctggaaagggtgtactctcccatgactctggataatagaagttttgttctgattttttaagtcacctcagacagacactggaacacgttagatctaacacttaagtgctttgaaagggcagta

SEQ ID NO: 386 - DNA, 139 bp, Homo sapiens
aatgcagccaaaagtgatatttgcttttctcagaaccataatcgatacaagatgcagtgaccaattcattccttaaaacacctgggctccttaagcggctagaagacacaagttacatccagcccatcagggagccaga

SEQ ID NO: 387 - DNA, 285 bp, Homo sapiens
  misc_feature (1)...(285): n=a,t,g or c
tccagccccccgcgtgcatgcggcagacatttatttgcacttgtcacatagtagcctgtgaggtagcccaggatgaagatgatccagaagagggccacgcgcccagcaccttcatggcgatgcccagcttgcccgtgcacagcctctgggagatcctgcggcanntgaggcctcttctgtgctggacacagcccctaggctgaactccgtccctgctgccgtcctcccacctactatagtgggacgtggctctcctgggggctgcatgctntgggggctncagcg

SEQ ID NO: 388 - DNA, 378 bp, Homo sapiens
  misc_feature (1)...(378): n=a,t,g or c
ttggggtcggagtggttttattgggcagcaggggctcanggccggtggggcgtcaccgatacaagtagtcagcctggatnttggcggcgatctcggcctcccacttgtccccgttnttgagcaacttctccttgttgtacagcagctcctcatgggtctccgtggagaactcaaagttggggccctcgacgatggcatccacgggacaggcctcctggggagaagccgcagtagatgcacttgggtcatgtcgatgtcatagcgggtggtccnggcggctgccatcagctctttggctcagccttcgatgggtgatggcctggggcngggcaaatggccttcgcagaattttccaggcaattcaacgtttccttcccc

SEQ ID NO: 389 - DNA, 267 bp, Homo sapiens
  misc_feature (1)...(267): n=a,t,g or c
ttcanctccttttattgacagaaatagaaatttgtgctgcagaggcagtagtacctcagagcatgagaaggtagtcaatggggctgacatgacaagccacaatgctggccaggggtcctaccatagtgggagaaccaaaaccacaaaaatagcaggaggtagcaaacatccccaacacccagtgtaagcatttccatttgcagagagcttggccatgcatctttaaaaacggggtccccttcacagctgggcagggtatcatgtcag

SEQ ID NO: 390 - DNA, 386 bp, Homo sapiens
  misc_feature (1)...(386): n=a,t,g or c
aaattatatattacatgtttattaagagcacaacttttatgtaaaatttacatttaatgaaaaaaatcaaaaatatttacaaaatcttggaagacagatgtgcattgttctaattacaatccaaagtagtaaataacaatcctttaaaactcacatttattagagttgtgtttacaaattcttggttaaagaggcagctacaaagtttatcactatatataagcaagaaccagcttgctagggtacatttcccattgaaaatctactgggtctcttttacaccattagggggatttttaaatggggnaaaaaaaatcaatataaactcatatgggcttcaaaattggtaacctgtaccccnatacttggggnatggagggctgtgg

SEQ ID NO: 391 - DNA, 220 bp, Homo sapiens
  misc_feature (1)...(220): n=a,t,g or c
atacaatangntttattgaggatgtgtcaatacagttaacatggttgcttgtcttttcaaaaagaagttccattttctttgattcccaagtgcatttttcctgaatcttctgtgatacagggcacatgataggtatgtagagagctaagcttcctataccaagttagaagtgaaatgactagtgggaaaacatttaaactttaatcttaaaaaaaaaata

SEQ ID NO: 392 - DNA, 357 bp, Homo sapiens
ttttttttttttacaaattcttttttattagtcaaaatcacaatcaccttgattaaaaaggatgggacactccaccctcagcagaaaatgatacagtttatagaaaacctccccgcccctcccacaccccaattaaaaactacaaaaaaatctcccctccttccctacgatgtcatggtagtctgactcctccagtggcactgcagctctggagtggccagctcaccacagcaccctccacttcaccttggggagaggagggatgctggtggttaaggaggttaaaaccattagttccagtaatgccagttcccaaacatgcacttccttcctttcccccaaggtctgggaccaagg

SEQ ID NO: 393 - DNA, 332 bp, Homo sapiens
  misc_feature (1)...(332): n=a,t,g or c
ttttttttttttctggagcataatgttttattgttgagcctcctaatttacaacaatgtcttttgaaatttgcttataaaattttgtcacagggagcaacaatgttaacctaattattattcacttattttcattttttaaaataaatgactataaataactgtctcttcagttaggatcagggatatcataaaaacatcactagcgagacatattttagtattaatactgatgcaaaaantgaaatagngaccnaatatttatatatatagcactatatatatttttatatattgnatactcatatcaaaacttgccatttctcttaagta

SEQ ID NO: 394 - DNA, 436 bp, Homo sapiens
  misc_feature (1)...(436): n=a,t,g or c
tttttttttttttttttttttttttgttaccagaggaagcagcttttattgatgggttatctccagaaaccagaaagactatatgtactcactttcagttacccccgtgcctccagantcgcatgttgctccacctgggggcggatataaattacctctagattgtccaaagcccagtctttcccttccctgtgcagccttagtaaactaagtagcagtactgtttggtgtgtgtttgtttcttccccagcaatgcctactgcagctacttagtaacaactagaggtggagggtttccggggaagcagttaggatgagttaagtgtgatgcacagggaaaatagtatcgtaggcctatcaaagggnccctctgccctgcctcagtgggcttgatttcttcattgggttgcatttgctctttgtgttgggatgacgc

SEQ ID NO: 395 - DNA, 364 bp, Homo sapiens
tttttttttgctgttatgattagatatttattgagcaccaggagagagtcagaacattagacttatagtggaggagcagaactgaaccctggcctgtgaaataacaatttcaattaaaagctgtctggccctgaagaaagagaaatgatcctggatatagctggtcctctgagctggcagagctgagcctccctcgggtcttctggtgggcaagatgccaaagttgaatagtgtctgtagggcatgatgaccaagtcctagtgctatgggcatcttccctctggtatttaggagaggagtaccagaagcccccggcagaggatactaggaagggcccagagccaaatccagcagctgggcttac

SEQ ID NO: 396 - DNA, 416 bp, Homo sapiens
  misc_feature (1)...(416): n=a,t,g or c
ancntttannnnttccaagtcattagctttatttttactgaattcagcatgggatgacaaaaatgcattatatcactaccatccattattacatgtagacatttatccttgtattctttatatgtccattttctacgttaaatctgttaaccaatactaattnaaattacatgatttcctactaaaaatatgcagttcatataagcaagggcaaataaatcctccttaaaacattttattcctttataattgaggaacttaacagtcttaatgggctaggttcttaaaaaatgtttatagggnttaaggtttatttaaggggaggccggncaaacaaaacatattgtaaaactaggtattttcccggaggccatttcccttctcttcccttcttcccggcaaacngggggttttta

SEQ ID NO: 397 - DNA, 320 bp, Homo sapiens
  misc_feature (1)...(320): n=a,t,g or c
agttntggggtcttgtcangttgcccaggctgatctcaaattcttgggctcaagcaatcctcctgccttggcttcccaaagtgttcagattacaagtgtgagccactgacccagaccaagaaattttaaccctaactaaatacccaaaaaaagtgtatatatgttccacaaaggacatgggtaagaatgtttatagcagcagtatttgtaatagccagaaactggaaacaagccaaacatctatctacagcagaagagactattgtttatttatacaataaactacaatatagcaataaaatgaatgagctacaacaaca

SEQ ID NO: 398 - DNA, 284 bp, Homo sapiens
  misc_feature (1)...(284): n=a,t,g or c
tggaaaaaannacaactttattttcagtcatttctatttccttggttatgaacaaaggtagcaaagtgcagttgtatcagcagtgccaatagaaattacagagtttttcatatccctttacagtttgccacaggtatcttaaaatattgtttacactcatctctcttcagtttaccattgtttaataggcctaccctcgatctttttattcaatatgttaataaagaaacctatacacatagtatcacgttatacattttaaaantnttttgacaactgtatat

SEQ ID NO: 399 - DNA, 316 bp, Homo sapiens
  misc_feature (1)...(316): n=a,t,g or c
agacagcttttgagtttatttggcttctggcttcactggancccgaggctaagactccaaccctggctggggcagcaggaaggcatccagagagccctggccccagatgacccccagggcaggaggtccatgctctaagccctagggcaggggccgcagtagcagganttggtcaaaagtgctggtgacagctgaggccggccccttttccctgcacctcccctcctccctgnatcaccccagcaggcaattccctgagacaggntctgggtcctcccaaccagttggggtacagttttggggccccantagggca

SEQ ID NO: 400 - DNA, 316 bp, Homo sapiens
ctggtttaaaatatttattgattaaaaaaaattaaaaattttttatacaaaggtgatgagaaaaaatctcatgcaaactccgggcatacaataaaaataactcaaatattaatatgatgattttgtacaaaataattcttttgaagtaggaccggtggcaaccaacacggctccctgctccaggccgggacgcccctctgggaggaacgcgcggccacccttggaaacctgtaagtgatccacggtccaggtgtggaatgctcacagttgtcactatgatgaatgatgaaaaccctattgctgctactcagaaacg

SEQ ID NO: 401 - DNA, 349 bp, Homo sapiens
tttcaggtaacaaagtccagtctgttttatttttaacccaaatattccaaatatacagaaaattaccagtacaaagttaaacacattcagatttatttacacaatgctaaagaaatttgagttttatttccattttgtggaattttatcatggggtctggctttaatgtgtaactgacgtgggtcactgaaactcgattatcccacctcacatgcaattttctgtcctaagggaatagaaaacttgggtttttagggcacatgcagtaatgatcttaatactgctttacactttcgtgggaaggcagctgtcccacagcctggggaaggaccacatgctcagaaagggg

SEQ ID NO: 402 - DNA, 413 bp, Homo sapiens
ttttttttttcactgaatgcataaagtcctttattgaaaatattgggatagcactgcattacatatagtcaatatccataaatgaagggtcacacatttctgaatggacaatactgttttacatagagaacacagcatctggatatgctctcacaattatagtatcatggactaaactaggtcagagtgaagtatatgcaaaatgaccatttggtttttttccattttattaatagcatatggttgcagatggtgtaaatggtaaacgtgatatcatgagacattcctgatatctcacaccaacacattatttaacgagcaggttaaggtgaaactgccagtatgctgttagtcaagagtcctcagtaggagaacttgagtgaaacgtacacccaggctacagatttaaaatt

SEQ ID NO: 403 - DNA, 335 bp, Homo sapiens
ttttttttttttcagcattacaaaaactttttttttgctttttaggaagtagcgaggaaggaaagcaaagcagcaggatcccctagagagtttagtctttggtttctaagtttaaaggggggattggcttcagagcttggagcaagacagaagattcgacggacggatgagctggcaagggagaagggagtctctggggcatgagcaagggagccgatttcttgtctgggttcatgaagctagagagggctgcggcagaggctttgaggcctgggtatagcactggcacttaggtgggataccagcacttctccagcatgggcaggtaggcattc

SEQ ID NO: 404 - DNA, 275 bp, Homo sapiens
aaagctacaaacctcaaggttgttttatttaaaccaaataatctgagcaagacatatatacattaaaaacaaatgaacacattaaaatttcactattttacaatctaaattctagcaacatatacaaatactgagtgactacagtacatgccgaggtaagataagtacattctgggagaatatcactgacgctcaaaccatttttatttccaatatgtatttcaatacatgtttgtttccacttttcccagtgccacacacacacacacacaaaa

SEQ ID NO: 405 - DNA, 398 bp, Homo sapiens
caaagtttacaataatttattattgttgcatgacatttgccagtaaaataaattatagaaactatagagtctttataaactattttgtatatcatattcacttcctaatgcttactgcagtaactgtatgaaatttaattagattacgttttagcattagtcagaagatttaaaaaatatgtaaaatgttttcacagtactttggatttataaaagaccccattattttaacttttgtgcaacctgtttgaaatgtataaaaaaccttttacaaaccaaaaggtggcgtaaggttttactgagttgctgaagacatcttactttcttgaatttctacttaaacatccatgtggtgcactttttcaggcagtgtaataagtggcaaataaataatcaat

SEQ ID NO: 406 - DNA, 459 bp, Homo sapiens
ttttttattatgtaaatgcctttatttgaactactacattgctaccagattacatcacttttcagagttagagtaacataataccttggaaactatagcaaacagcttgacaaagcaagagtacattaattcctacatatatacttttatttttagtgaccacatttctttgtttcaggtgtaaaattaaaaaatatattgtacacttagcatacttggcctaccaaatcccgtctaagttctgagcacactctctcctcaaaagtatcatattcaacagcattttaaatttagagagagagtttgatgatacaggttttaaaacaaataagcatgtattgaaccaagtgatttaagacaaaatatttcaattgtttacagcttgggtatgagagggaagatgcaaatttaaggtacatttttcctctagctacgatggtatgttttacttacctggat

SEQ ID NO: 407 - DNA, 381 bp, Homo sapiens; identical to SEQ ID NO: 25

SEQ ID NO: 408 - DNA, 598 bp, Homo sapiens
  misc_feature (1)...(598): n=a,t,g or c
cacagcaaacggangnanggcctgtatttcacacctgctcactcactccatggcttagaaaagaacacgtccaccgcggaggccgcaatgcccacctagagcaggtcgtagaagtagtccaggccctggccagctcccagatagagaccccaacgcccagctcccgggccagctccagccgcacctgcagggacttcagggttgggtagaagacgacgtgcctcccactgcggctcttcttgtactcgaagaagtgctctgagacctggctgtcccacaccatccggggcctgtggtccttcagtgtctggatgtacctggccccgacaacaggctcacgggcatccttggaggtcgcgtagtccataccataagaagtttgagccccaggaggattttgcttcgccactttggacttcgggtccaggacctggacgcaggctcgaacccaggacaggggtgcattagggccaggctgatgcgctgtagagtaatcgtaggtcatgaagctgaaaccatccagnaggggggcagttntcaaatcctttgtggtgaaaatgccanttggtcggtcccggggtgattgnagcggaatnac

SEQ ID NO: 409 - DNA, 359 bp, Homo sapiens
ttttttttttttttttaaaaatcagatggggactttattgtgatggtggcaggtccaccagcagatgcaaatgtggggtgctgagagtggcaacacaggccaccccaaaccaacttcactccctcccctgtcctcagccagtacagaagccaaatgtagccccagccctagactccagcccaggcagagtccaagggaggggtgtcagggtcagaagtcacagggagcccagtgactatcaaggtggctgagagcaaggctagggtagggatggggcagagaaagggcagggggtgcagcccaggtggcccaaagcaacacagaggagcaagggctggcattcaagtcagcaggtccct

SEQ ID NO: 410 - DNA, 241 bp, Homo sapiens
ttttttagattcatctttttaatgacatcctaaaattcagaggaggggccagcgggacctctgggctcagcggctgtgaaggagggacccgcaacacccgctaaggcaggtaattgcaagaaggcactcgcgagggggacttcaagcccctcttctatttcttcatataaaatcagggggatggggaaagctccaagggcgagggaagcagagagtttctctcccagcctatggaataagg

SEQ ID NO: 411 - DNA, 333 bp, Homo sapiens
ttaataaagcagaaatgtatttattaggcacccttgttcctcacagaggagcaagatccaggcctgagcgcctgggaagtctcttgaggttgcaggaatctccagagaaacataggcgctgcccagccaccaccccgagaacactatttgggctggagtgtgaccgccgaggtgatcctggcaggaggctggggttggctcctcgactccacaaacactgaggagtgggtggggacaccattgacacccacccaaacactggcagagagggaaggcccttccagattctggggcacatgttgctgggcctgccagggggaaggaggagcctgg

SEQ ID NO: 412 - DNA, 335 bp, Homo sapiens
caagtttcaatcatttaattaacatctttaaatgaaacacagttttcttcatgtgtctcactcaggcttcagggcagagggaatggatttttagacatatcaaagactcaaaaatttaaagaaatatatatatgtatatatatacttctaacattttatggaaattaaaaatcagaggcttttggtctctccatttactctaggtcaagctcatttaccccagaggacaaagaagggctgcctcttctagaccctcccttctcctttgtcctctgtcccacccagcagggaaacaagctcagaagatcctaacaggatagagttccagtaatgtt

SEQ ID NO: 413 - DNA, 329 bp, Homo sapiens; identical to SEQ ID NO: 28
  misc_feature (1)...(329): n=a,t,g or c

SEQ ID NO: 414 - DNA, 439 bp, Homo sapiens
  misc_feature (1)...(439): n=a,t,g or c
tttttttttttttagtcttttaatgttagccttttaatattttccaataagtgctttcaactcagcaatatacatatcatgctttcctcattattattgatccatcaataaatatacaaaaaccagaggaagggtgtgctctgaaaagtcaaagtaacaataacagtggtcattgtacagcacaagaatgaacaatgggctattctttgaaaactcaaaacaaatgatttacacaaagacatatctataacataaaggtgaatggaccatgttattcttattcttaagtacattttgcttttccagataagtcaaatgtttcctctctcctactcctctgatataacagtattgaatgaatgttggctacaaaatcaattcttggtgttgttatgaatctcaatataaaacttttggaaaggttctgctagaaaagccn

SEQ ID NO: 415 - DNA, 374 bp, Homo sapiens
gagaggtctgctactttattttgataatgcagggatattatttatctttgcagaatcaggtgactcccaacgttcccggaatcttctagtggtctgtgtcaggggtctgggctggctggggttcagtgatgtctactggaggcagcttccatgccttctggggtcctgagtctccatggcttgtggggtctgggtcccccctggattagtggatggccagagtggcatagacactgggctcagctggagaggccccttcctgggatggaggaggctcagttgccttctgtctgaagggtaaaagctgtgcagctgggcgtaggtcacatcctggggggcttcagatgcagcagcctcagtgtccatctgtctgt

SEQ ID NO: 416 - DNA, 356 bp, Homo sapiens
taaatatgacagtcttggatttatttgtaagtgtttaaaatgtccaatattcagaagttgtcaggtgttcttaccacctccccactccctcaaccagtccctgcttccagggtccaggagaagcagtgttcaggcagagtagtctcttgccagagcagaacaaggagtcctggtggccaagtggcaagtatgcaggctgggctggtccctggtgggacttctcctgggcttttcctcccatcatcttccttcacgtgtctctcagccctggcagagtttggagctgataccctgggtcatggccacagtccagttcactgggtggatgtgtccctggcttctgtccatgccaggct

SEQ ID NO: 417 - DNA, 445 bp, Homo sapiens
ttttttttttgtttacttatttatttattttcaccaccaacattattagccatgcctttctgctaatcgattttagcaagtcgaggtaaaacacatgcaacattttctggcaaaagcttaatgtcaaacaatatgtgatccatactgtgtgtcgtccttgggggtttatttgactttgtcacaatgacagccaacagtgagactgataagcctgtaaaaataaaaaaataagactaatcaaatagacatggcattttaatctcaaagtgcaaaatcatctaactgaaaatgacggcattgaaaaattccagtggttaaaaatgaatcaaaacttcattacgcaggcagtggaagtgtgttgaaagatttaccaggggtgtcaagttttagacactcagaaaggcaccattctagccatcttgattggataacatggtatatactt

SEQ ID NO: 418 - DNA, 456 bp, Homo sapiens; identical to SEQ ID NO: 31

SEQ ID NO: 419 - DNA, 206 bp, Homo sapiens
gctgccaccaccatgaaagagtggccaccacatctttattgcatactcaggtgaataacttattatacaatgaacactcctccattaggagaccatgcccacttacagaatgcagccgtaaatgcggtaaatctatttacagaggttggggtgcaagatgagagaagtatcagccccaggaatttgaagtgaaaatgatctacaaa

SEQ ID NO: 420 - DNA, 668 bp, Homo sapiens
  misc_feature (1)...(668): n=a,t,g or c
accacctgactcagacttctttgtcgttgttttatttaaaatgttattgtctctgattagaaaatacagtcatgagggctaaaaactgaaatgatgtgaaaaggcatccattaagcagtgttgccccaccaccctttccatcagtcttgtctcatggggatggggaaaatgaagacagaacgctttgccttgctttgcaatccctcctttgaaggccttctgtcccaggaagccaatgttcatttgatgtggaagagggacctgtgtttaaccagaagctgtcctccctcatccctttcccatggcttacacgcagaagggagaggagatgaccagaggagaaatcaggggaagaaaaggcaacaggggaggcaaagggaaaggagaggaatgcttaaaatatacagtgaaatttgagtaggattctctactcaaagacttctctgggaagtgtccagaattgaccacacaggtgctgacggtagaaagaacacagacccanaaccctgatctagttgcattaactccattagccctgagttccctgtaaaatgaagactgtngaggaccactagaggattctgtgacttctcaactctaaaattttggactggacctcgtgcgaatctggctcgaggcaaattcctatgtggcgatnaatcgnacag

SEQ ID NO: 421 - DNA, 242 bp, Homo sapiens
  misc_feature (1)...(242): n=a,t,g or c
cttacacaggntatttacaatcataaaagcgancagtcctggtaccagagtgtgagggcaagaggtctgtccatcctccctctggcagtcgggccctcgtgtccttttgcctcagggacggaagcttttgcaggagctgagttgttcaaaggagcctgcgataagagagttgtctagtgaggaaacctcgagatgtcaggattggcacgaactccacggcgctggctttgggggatcgctgc

SEQ ID NO: 422 - DNA, 371 bp, Homo sapiens
  misc_feature (1)...(371): n=a,t,g or c
tcagccaatcacaaaaaacagactttattgaagtatttagcactaaaccccacacaattccagctctgtagctgaggacacagccacttggcaatggcaccaggtgttatacaagaccaataagttaatgtaaaggacgcttaggtgtggagggccagtgctcagccgtctcctggctcagaacaaggcactctgggctccagttaggacactgagaggccagggaaaccaacatgccctggagaaaggggcttagagacaaaccggaaaagcacagcatccaagcagggtattcacgcatggggggcagagtaggcccaaaagttgggggttgcctgatgcggtaagagcacagttgagagnaattncca

SEQ ID NO: 423 - DNA, 638 bp, Homo sapiens
  misc_feature (1)...(638): n=a,t,g or c
tggggtgcgcggcctggctactctggctgcaggccgagggttgaacgtttattcatcacaattaacagcctatacaagcatctctagaacagaggctgtgggtccaaacgggtccctgcagctccaaccctctggcctctccgggcactgcctcacagccgatggagcatggctgggcaggcagacaggacacaggctcagtcacagggtgtcagggggaagctcttctagctggaatgattggaagttggcccagcggctggggctggtctgtcccttcccctcctgggaagttccacctccactgtagttaaggccaccaggatgaaagcagggttaggtccagggacccagtagagccttgggatgcatgaggtgggggtaaatgggcttggcagagaaatggagattgggaaggggcctgattagaatagaaactgatgatgttggttcagcacctgcaagatgaggaaggtgactgcagcaaccttagagcttcccaaaggaagcaagtgatgcccccatctgccaagagggtactccttcagcccttgcacaagagccagaccaagtgtccaggaactccacagacagaagcctgccgagttangggatgtggttaagaaaatctcccgggc

SEQ ID NO: 424 - DNA, 292 bp, Homo sapiens
  misc_feature (1)...(292): n=a,t,g or c
ggatttaccaacacgtaggcttttatttcttcccattacatctgtttagccacagaaagcattgggccatactcactgcagaagataagacttcctcagaatcttattcgtttagtgcactcaattttacttcactgtctcatcacttgagagactggttaaggcaagaaacccatttcttaacattttttttattttcaaacatttgaaaagcaacaccaaaacgtatgcagttaattcctcaattctttcccttagnatagcactttttaaattacaaaaccacacttac

SEQ ID NO: 425 - DNA, 346 bp, Homo sapiens
  misc_feature (1)...(346): n=a,t,g or c
ttttttttttcttttaggcactttttattttccaaaaaaaaattgtcgttaatatataaacatctcattctctcaaaaaattctacaactatacagctgtttgctccattatttgcataggaaatgaccacaatacaaaaataagagggaaaaagaagcaaaacagcaaccgatttctgcttttcatgtaggtgtgtttccacgtataaacattttgaagcctcttacaaaattatttacatcgtttgtcatcnatttacatcttttaagagcaacttttctaacaaacaaaactataatttatcaagttatgnaaattgtcttctaaaaaaacttactatattac

SEQ ID NO: 426 - DNA, 469 bp, Homo sapiens
tttttttttttttaaaaacagaagcgcgaccatttctttattaaattatacaaaagggttggggaggggggcagctgtggggctcggcacaccccgggccccaccccggcctggcgctgtctgagaagaggggatctgagggagatccagggatcaggcaggatagggatggggcaggacatgaggctgggggatgcagaggttaggtgggagaggctaccggagtaagaatgaggctggtaggggagggagaaagagagcaaagagagagaggagcaattgggggccagctggagagctcagatggagcaggtcaggaggtggaacaatggcagagtgagggtggagggcgcagtgtctggagaggcggaaatgagaaggctggggagaaagaagagggtggcagctctggtgcagggcccagagcagggagccaggtgaagagtggctggactttgctgcccccacc

SEQ ID NO: 427 - DNA, 4003 bp, Homo sapiens; identical to SEQ ID NO: 300

SEQ ID NO: 428 - DNA, 4003 bp, Homo sapiens; identical to SEQ ID NO: 300

SEQ ID NO: 429 - DNA, 419 bp, Homo sapiens
gaattacaaattgataatttattaacctgtgcagcaacaaataagatttttcaaaactcaacaaagtgctcaaagttgacattacttgcttcaaagttagtttaaggcaagtaaatactaactactgcgaggtggaaaattgcatgaagaccctgcaacgtcattcactgaggatcttctcatccttttcttttttatctcgtgccccttgtctatttcaaatcatcaggcacattcatttaataatttcccaagcaatttttaaaaagacgtttgggagtgtgtaaaagtttagtgactttcacactaaaacttgttgtcagaggtacatggtgactatctccacacaggcagagctgggacccaacttactaaaccttcacgtgagaatcttctatttttaaggctgaaggatggca

SEQ ID NO: 430 - DNA, 385 bp, Homo sapiens
aaatgaaatctatgaatttttttattaaggatttgataagctgatataatgaaaacatgtaaatgaaaaacatttacactgactgtacgactagtgtgctaagccattacaatagtttactgacataactggcaagagtaacttggaaaataacttaatccagcagaacaaaaacatcctcagaaaaacatcctcagtagtactgaatatatctctctcatatatctatctatctatctatctatatatatatatatatatagctttgcacaatcagggagcaaggcaccataatgaaatgagcatacatttatgcagaagaaaataatagcaacaaagctgcgagaaaaattgtaacttcatcttcactgagctgtgcataatc

SEQ ID NO: 431 - DNA, 399 bp, Homo sapiens
gaatacagagcgtctgtttgggatgacgaaaaagttctagaaatggatagtgtcgatggttgcacaacatagcaaatatactaaaagccactgaatagaacatttcaaaagcatgaattttatctcaatatttagaaggaaaaataaatattcttagaagaaacaatattaccatcataaatggaaaaccggtaataataaaatacatacataaatattaagatttacaatgtctattagcaagtcaccctaactcatcttacagaccaccagtaggacaattacccctttgggtgacatgaaaaaggctgccagggggcttatgtccagtgcccagggtccagcatggcaacatattttgtaaaaagttccagcaggctgtggacagcaggaataggc

SEQ ID NO: 432 - DNA, 429 bp, Homo sapiens
  misc_feature (1)...(429): n=a,t,g or c
ttttttttttttttaagaggagaaagtaagtttatttttctttgcattacatcactgagttcccataggtatgcagaggccacctaacaaaactccatctccctgcccaaagaatgcccagtgggagcgtataactgtgtaagtaaatggtttcattgtaaataaaagaaccttagaggcggacttgtgctgtggagagtacaatggcctggagcagngagacagatgctagacccaggcctgctgtgtgacctggatatatcactggcttctctgggccacacactccccagatataccaacaacagggcaggatcagagggaaggatctgtctgaggtcccaggagctcacccttcagctgcaggcggatctccctccccagctgtttgatctcatcgcgcaggttctgcagctcctgcttcatgcc

SEQ ID NO: 433 - DNA, 193 bp, Homo sapiens; identical to SEQ ID NO: 37

SEQ ID NO: 434 - DNA, 278 bp, Homo sapiens
cactggaagcctgaggggctgttgctgagcctcagccccagaaatacaaaaagtctttatttcacagaaattagggccatttccatagttatggggaaggacgtgtgagcaggatgggaggtgctcagctgactgtcctctccagaaggctcttctgagctgagcaggagaccccagggccacagccgagccccaacctagacacggtctgagctccaaccttggctggctatacttcaagggcgggtagggccggcatggggctggagggagtcagc

SEQ ID NO: 435 - DNA, 330 bp, Homo sapiens
gaacgctggtgatggttcatgcaaaagattactatgcaaggagcaaaatctaagactgctgtttttcccaataaattcaattgttttccacaatgtagaattttaatcttcaaattaagtgtagctaggacagtgagtgaaactaatcactgcttgacttttattttcatctaggaaaaataacatctgatgtcaccacattaaaatgccttcctgcttaatatcagagaaaaaaatacatgttgccagtttagactcagcgcagtttatcatttggtccaaatttcatattcaaactacaaaaaatattttttaataaagaaaacatat

SEQ ID NO: 436 - DNA, 433 bp, Homo sapiens
cttttgttgtggctgctgttctattgatggcaggtaatcatcactcttcactagctgagcattcggtccactaacctgagtcatatccggcactggtttctctagaaagggctccgacggggaatgctgatgcacaggcactttctgcggggtgttctggggtgatgggtggagctgtcccaaggctggtgatgagggtgtggaggtgaagactggtggtgcaagcccgggtgaggctgcagtggaggacaggttggcaactgctgaaaagatggctgttgaccaggatgttgttggccaggtatcagtcgttcctggattgcttgtgggtctccaaggccaacaccaggacaaccatttggcctcatgtgcccagtcaattcccttggtgccgaggacatgcctataaatggacgagactgctgcatgtttc

SEQ ID NO: 437 - DNA, 358 bp, Homo sapiens
ttttgttttttttttttttttcacataccaacaaaggactttattagtgcaaattcatttgaatatttacaagcatatatgatagtgcatttcgatgcaatctaagaaggaatacattacatgggaaactgtcttaatattttcattataccgtgcagatttctagaaaaatcaacaagcaatagtcctgtctgaagcacagaatttaaaataaagtttacctccattacagacaagaaaacaaaaaattatcggccttataaattttagtatgagtacttaaattaggtacttcacagatttattttcattaattaatgaacgaaagtaactggtatttataagaaatataacattg

SEQ ID NO: 438 - DNA, 249 bp, Homo sapiens
catggaaaatactgtatttgtatacacaggaaggatagctgcaagcccctcacagaggaaactccaccccaaagaaaaatcttagcagcaaattcctatctccctcagcactatcagcacagcccaggccagaaggttgggcttcttgtctctgggaacccatcatacccttcccgccaaagaattctaaataaggcaggaaaaaaaaatattgtgagtccagtggggagctggggtgcctggtcattc

SEQ ID NO: 439 - DNA, 322 bp, Homo sapiens
aatgtcctagcttggtttggtcttgaaaagattcataatcactccaaatgaaatgctcctcccttggccaccaatgtgaagggagggtagaaacctgaggctagacttctgacacaagaagaatctgtcgagagcacagtctcccagtcaataagaaggaaggagagagggggatgagctcgcacccttgagaagaaccttcatgagccaattcccaaagcatcaactccgcatggatactttgcacacacatcagccgtgtctaatggacacacacacgtgcatacacacgtgagcacacgccgggaccacagacccttat

SEQ ID NO: 440 - DNA, 297 bp, Homo sapiens
ccttcttaaaaatattacatgttttattatcctgtccccagagggtggtttatccagaaaccaagaaaaaaaatcaatcagaataaactcaaaaaaaaaaggtagggggagcaaaaccatcaaccaccaggcagccaggccatcagcccacctccacctctggagggtccccagagacccacgcccgacgcagacccggaggagcatcagcaaggggcccgggcagagaatcggctatgtcttcattatgagagcaggagagacggcagagatatgttgctaggtgaatatatattt

SEQ ID NO: 441 - DNA, 478 bp, Homo sapiens
ttttcaatttttaatttttttatttagaaataataaaataagacataatatataaaaatatgtacaatccatggtttgtgcagtacaataggaagactttagatacaaaaagacagcaaatgggaaaataataactatcacgattgtcaatggctaggattgttcaacttgccagagcccagagcggaaacccaaaattaccagaaaagagattctactttgctgagggttggggatgggcaggtagctatgccacacttttttttttcccaccttaacattattagacacagagtgaaaaagaactcactctacttctcaggacaagcttttgcttttactgagtggtttattataaaatatgaagtgacatttattaattgtaagggaaatatgatttacgggacagaactcatcaaataaacagagttgagataggagtgtactggtaagaaaggaagtaaagagaagaaagatg

SEQ ID NO: 442 - DNA, 302 bp, Homo sapiens
tttttttttttagtgcttgatatttattgaaaataatgccaatgctttttccaggtagtattgaggagctgggctgagtgcttgtttgttttgtttttaagtactatttgtccaaatgcacacatctgtgggactgctgcaattttgaaagaaaaatgacagctgtgtaaaaccagtgcataggaaaaaagaagtgtcaacaatttggctgccaggcacaccgcgcccctgcagcaatctggtggggcaggggaggacactcggagtaggtagaaaactaaccaggctgaacggccccttca

SEQ ID NO: 443 - DNA, 172 bp, Homo sapiens
gaattatcaaactttattggcttgttaaaaatgattgaattcagcaagtacatttatgatctatctacattgttaaaacagcactaaaaataaaattttttaaaatgattatccattatttacagaaaatgtggaaaagatggcttttaaacccagaacattataggaaaaa

SEQ ID NO: 444 - DNA, 267 bp, Homo sapiens
ttttttttttttttttgttacacagctctttaataatagtggccatagctgtaataacaatgacaacagtaggtaacggtagtcataccaacagtagggcagtgcattttatattacaactggtttcttgctctagtaggcttggggatgggtgaagacggacagggctggcgcagaccctttccttctcctctccagcccacagtgatctgggcttttacaagacagcctgcttccattcagtagtgtgggaaagttccttcttgg

SEQ ID NO: 445 - DNA, 418 bp, Homo sapiens; identical to SEQ ID NO: 40

SEQ ID NO: 446 - DNA, 586 bp, Homo sapiens
ttttttttttttttttttttttttttttttttttttttttttttttgaagagcacaattgcatttattttatccaatatgcagataagtctaagaaactaggaacagtctgtatacttgggtgtattttcttcttaactcttctttggctaagtcagcaagcccatggttactagcgtcccaagcaaacctgtcaacgtgaaacacgtgtgcccagatagaagacgggtagtacctgaagtggttccacttcctttatttggggttgtttcatgaaaatgcttggttgtcctggaaacaggtgtactccgtgttgcttgagcatttggtgtggtggtttttgtggtggttttctgaaaagttggtgagacttctgtagttggaacatttactgtggtaggtttctgaactgttggtgggaccttgggagttaaagattttcctctgcattcaggtggtggggcaatccaatctccgtcatcattattcacagtacaataaatagaggtgcctccaatcagtgggaatcctttattacatgcgaacgttaaagactgtcaatatccaaaaaggtccagtccccttga

SEQ ID NO: 447 - DNA, 362 bp, Homo sapiens
tttttttttacaagatgttgcatcactttattttaattgcatgatttatcagaacaactattaacatacgaagtaccattcagttcagctgcaggtataggcagtgacaagtatctaattcttagaagaatcacttactcccacaatctgtccagacacattagtctaaggacaagtttataaatagcaaacgtgattttcacattgcagtgttctcaagaatgtatatacaagtgtgtagtcctgttgatgggatgtttccccgagttctttctattgatgcgttcatgctcttgaccctggtagagacagttctttctttccacagagcagattttcttttgtcatccaccatttacaat

SEQ ID NO: 448 - DNA, 257 bp, Homo sapiens; identical to SEQ ID NO: 41

SEQ ID NO: 449 - DNA, 454 bp, Homo sapiens
tcacggctgataggcttttattacagactgggggcggtaacggctggacagagaacggaaaaggaacatctgagaccaggctcaaagctagggggttacacaacctccaataacacaaggtgagtgcagcacttctagacacacacacagacacacatcacttactcataaacggcacagcctacggtacaagaaaaagggcaaggtaggtaagggcacccaacaccctcctgcctgcagggggccacagggttaatgtgccttcctgcacgcaggcttaagagggataaacaaggagagggctgcccttggagaaggcctgcggataatagtgactgaggcacaggtccatgcaggggaaggaagcacagttcacagagtggcaagctcagtgccagccagtgcaagcaacaggcagttctttgatcctggcttagtcacagcaaacatttac

SEQ ID NO: 450 - DNA, 305 bp, Homo sapiens
tctccacaaaccacttttattacccagtgggtgggctgggctgtgatgttggagaaccttgggggtgggggctgcggaatgcagctgagcctctcctggctctgtctgctggtctaggccagggtggggctgatcaagggcagagagctcaatcttgggggaagaggaagagaggacagagaggccaaacaggctcttcccctcctcttcacccatgccacagcattaaataaacaaaaagcaactctttacagcacaaactacacagggaagtccttcctcccagccctgggcgcacagcatgg

SEQ ID NO: 451 - DNA, 392 bp, Homo sapiens
ttttgaacgtacacaagctttattgggcaacagcaacgagccacgctggcaaacaatgaaagtagagtcgctcagaaacacgaaagatcatatgtgtgtcatcacagcatcgagaatttaaatcatctggaagttcctgctaaattaaagcatactgtgccagagctcccctctaatcaaaaaacgctgtcctggtgaaaatttgcaatgaggattacagagagagagatcaaccaatgaggaaatcacagactcttacatgagtttacagttaaccccactgcaacaaaataataaattagccataatttgttttttttgcaaataccatgccccccacctgaccccacaaagacaacagtcactgacatggcccagctatattaacagac

SEQ ID NO: 452 - DNA, 194 bp, Homo sapiens
aaagaggcacgatctgatttatcagtttctaggaaacaccctctgggaggaaggcaggcagcgccgccggagaccttacaaccgcccgctaaccggggaggggggccggtagggcgcctcgggtctcaaggcgccgggagggtctgcgggccctgaaggtccctgggtccgagccacaagtcggggcagaaccg

SEQ ID NO: 453 - DNA, 294 bp, Homo sapiens
tcctttttgggtctggaacactttaaaatagttcttaaacaatccatagcctttctatggctccatggtataacataaaagctttaaaaatcttttttgtaccaaatggctgattctcaagaacctttgccatactgagctcctgcctggctcacagcttgaatttcatctctctttcagggtcatgatttctgctattagctggcctctttgtaaatcaacacctttgggaaagatcggaatctaagtaatgacagaaactgtcatttagccgcgaacaagaaaatgggaatt

SEQ ID NO: 454 - DNA, 407 bp, Homo sapiens
ttttttggttgttcatttgccatttattgttctgcaaagacacctcatgagcaccaggtggcgatgtcctttcacggagcaacaccaaagacttcaaaaacattccagttacaaacagaacaattcacttaggacattcacctgcctatcccagaacccccaatctaatgccggggaccacagagaaggaaaggggtcaggggtcctttcttgtaccagtgagccttcccccagttttctcatgcacacaacagtgcaataccaagacgagtacttttgaccaagtataaaaccacagagaagaccaaaatgtacaaaaatgggaagagaatgaaaacacaaaggcacacgcagccacaaatacacaattaaccttttaggggatgagcatctgacgaggtttgtct

SEQ ID NO: 455 - DNA, 174 bp, Homo sapiens; identical to SEQ ID NO: 50

SEQ ID NO: 456 - DNA, 418 bp, Homo sapiens
ttaagacggagtctcgctctgttgcccaggctggagtgcagtggtgtactcttggctcactgcaacctccacctcccgggttcaagtgactctcccgcctcagcctcccgagtagctgggattagaggcgtgcaccaccatgcccggctaattttgtatttctaccagaggcggagtttctccatgtaggtcaggctggtctcgaaatcctgacctcaggttatctgcccgtctccgcctcccaaagtgctggggttacaggcgtgacacgccatgcccagcctaaaaggacattcttaaggcagaaagaagggggcaggcaagggtggtctcagcccccagatggaagtcagagtgggctgcaaaagatgcagatgggcaggcagggagacaggtaaacagacagagagacaaggtg

SEQ ID NO: 457 - DNA, 326 bp, Homo sapiens
ttttcgtggtttcgtctatttattaaaaaatatttgagaacaaaacctctgcctctttgagtcttgctctggcatccccagcatctctgattctccctggtgcccccagctcaggaagaaggtggtagtggggagagagggtcaggggggcttggcagggatgcaggcaccatgacttttgtgaccagttcctagagacgcatgggtgtagcctcaggaggaaagcgagaggagctttaccatgggaacgaaggaaagggacaacattgggaggcaaacgttgggagactagtccagaaacttgcagttgaggatacaacagggtc

SEQ ID NO: 458 - DNA, 388 bp, Homo sapiens
gttagctagtatcttttattgtcagaacttctgtgagccaacaaacagttttgcatggttgtacacaaagggacaaggcaaatttcttttttcgtgtgggtagacttagttggcccaagtccttaaaacttttccatataaaaataaaaagtccaagaccagattatttttcttctggtcataaatgctgatttatttacaggtgccttgttcagaccaccattataaacttgggataaaatatgtgtgtattaaagcctcagcatttaatgtcagggtcctttgaagattcactcaagtgttaagacgtttctggaatgcagcgtctctcccccatagtcaacatggttattatatctgtaatctatccagaatgatagaagctaac

SEQ ID NO: 459 - DNA, 411 bp, Homo sapiens
ttttttttttttttttttcacagtacaactcaacactttattccattgtgattggtatacatgtaagattgagacatcaagagactaaaaatcagtgcagaacttctctgaactaaagggccgtgaaaggcatgattggttttggcacacagagtggataaccatacattggctggaatgaggtggtcaggaaaataaaatgcacaaatctaacaccatgttgaaatcatgtctgagttctggagaaagttaaagtgtaaataattacaaagactgacatgcaactcttaccttacattattcatctacagactatttttctcccttagagatgaggagatggccttagtaatctgttcagagtagctgaaaagaccaatcaatacacattagaaagatctgcctgatttc

SEQ ID NO: 460 - DNA, 206 bp, Homo sapiens
  misc_feature (1)...(206): n=a,t,g or c
aatggcattaaagttttattagtatttgyccamatytatacagttatttacagggcatgaaantggaaacagcacacahatacacttgaggtataagyyagagcacagtatgtcatgtttcaataaatataattcaaaatttgtaaactaggtgaccagatacatgagtcttatttttrgtaaaaccatataaaatatttatytca

SEQ ID NO: 461 - DNA, 280 bp, Homo sapiens
gtataaaaataattttatttactactgtaaataaagtagtgcaaagagtagtttggacccacaatattgcattactgatttattcactaccttagcagcatgtagtatacagacattctgctcttcctcttcctctctaacacacacacacacacacacacacacacacacacatatccctgtacagactcacgcaggcatgaggggtagggatgaaactataagctagaggcttacttgctgcatattccgttgctgccagtctattctaacgtgtaat

SEQ ID NO: 462 - DNA, 266 bp, Homo sapiens
  misc_feature (1)...(266): n=a,t,g or c
aatcaaaaccatctttattatttaaagagcatcccgtcatcaggggcacctagacaggagtcccagacagcagaacaatatttacatgggggtcaggaggtgaggttgggtggtctcggggctgagtgggcccgccactntggaagagaggaccctggagggagggtgtccttggacctgtggaccgggcccaagaagaaaaacgtcccatcctaggcccagcgtggatcccaccaccgggntcacctcgggccctggaggctgcg

SEQ ID NO: 463 - DNA, 263 bp, Homo sapiens
  misc_feature (1)...(263): n=a,t,g or c
gacaatgtcataggcatcgttcatcgacagattgagcttctgcataaggtaagccacagtcacagtgactgancggctaatgccagccaagcaatgtaccaagacaccacagttcttgccccgggcttcatctatgaaagaaatggcctcagggaaaaactgggacaggttttggctccagtgatccgagatggggatttgcttgtatttaaactctcctgcgttctcaaagagattcggcaaattgggggtgacgttcaaga

SEQ ID NO: 464 - DNA, 292 bp, Homo sapiens
tttttaatgaaaatcgcttttattttatcgcttttgttttgtatttttgcaacagaaaccccctgctccagagtcagactgtagctgaactgttcagactggagaatggagcaggctgtgggccgccaccccgtggtcccctctcctgggcaagcgcccacccccagggaacaaggtccaggcaggccagctcactgcacgcactggcaccaccacttagccatacaggtcatcatcattgtcttctgtgtatacactgccactgtgccggacctccactgccctgactggg

SEQ ID NO: 465 - DNA, 353 bp, Homo sapiens
  misc_feature (1)...(353): n=a,t,g or c
ttttttttttttttttttttgcttcacaaatgtcaattttattgacactagtgcacaactaaatacaataattgcaaaggaagtggaacgtgttcaaacagaaatggtgacaatgagttagaactgcagttntttcaaggtactacactattatttaaaaaaaaaatcacaaanagaaaaatgttatcactacaagtagggatttaggaagngagnaaattctgggcagtctgtctagnagggttaaaacatttcatggcatttgtgagttgctgttggagagttgttttttatttgtccaccgtaatctgggcaacatccgggggcttaccttcagctctcggcactgtgcg

SEQ ID NO: 466 - DNA, 378 bp, Homo sapiens
  misc_feature (1)...(378): n=a,t,g or c
acaatctgcttcctctaatatatccccagtctaaggcatttaaaattaaacagctcttcaacgccccaagttatttcatcaggctaagaacttctccgagaaacgcacaagaaggcaggcaaacaggtgggtaggtgagaggtcacggggctccatctgcaagctccatctacaaggcatcaatctgcgttgtggcatcaacgttaaaatgttctacagcttagggatcttcttgaagcaaggttccaagcacaaaactagtatgaccggaggcttcaatttagaagatgcagcatctgaaaacctttaccccaggaaaggaggggtgcctggctgggattncatggggctctggaacaagcattttattcaaagctg

SEQ ID NO: 467 - DNA, 375 bp, Homo sapiens
  misc_feature (1)...(375): n=a,t,g or c
agcantgccctctccccacagtaataaaaagcactgtacataatgccctgggaagaagttagacatgaactccaatacttcaggacaagtatggttctcaaagtgtgatccagggaccaaccctctgaggaagtccacgaggtcaagctattttcataatactgctacacagatgttatttgtccctttcactctcattctctcacaagtatactgtagagttttccagaggcttcatgaagtgtgtgtggtgacattattgctcccanggctaatgtaatgtgtgcatgtgtatttattttaaaaatggattcgctttaatttcnagtatgggtaagtatccaaagnaccaaatataagcaaagcnccttgaga

SEQ ID NO: 468 - DNA, 372 bp, Homo sapiens
  misc_feature (1)...(372): n=a,t,g or c
agaacaaaatatattttattttaattataccagcacagtaaggcccagaaagaccatggagttgcacaaagaatgttcagcaccagcaagataaaacagatactggcagtcagtgctaacggctagcacacaagcccctgccgcatttgtatgatctggagcaganctcctgaacatcttcatccatgtgaccctgtgcagcactaagaaggtgtgtccgataaattgcaattacttcttggtgctgtctgtcagcatcggccagctgttgctccagagatttcacttggtgctgcagagtgtcaatcagctggctctgcctcttggtggggttcccacttgtgtaggtgagttgggaaaggccattgagtg

SEQ ID NO: 469 - DNA, 544 bp, Homo sapiens
  misc_feature (1)...(544): n=a,t,g or c
ttaatttaaagaaaacttctttattaagtaaatggacagttggtacacagatattgcaaaaatttcgaggcgggtacatgaatgactgaaattcaggagacgcggggagttagcacagaagcactttcctcattcagagctcttttggctgcgagaaacagacacccaatcaaatcagcttcancaaaatgagagaatgtatcctgacaagggacgctcacagggcctaaaggaagagtgctgggcccctggaggactgagggaagccggcagtccctggaggcggtgccggctgctctccaggcgcctgtgattcctctggtccctgccttgctatgcgtatcttccctctgagcagagccattttctctaccacattcatgcaggtgcccatcccccggaacacacacagacaaacacacacacatggacacagtcanagctccagggtttctatgtgttcaggtaaggganctgcaaagcctgaacagcctccctaaatctagatgcccanctttatcctttcagctccatcagangatca

SEQ ID NO: 470 - DNA, 138 bp, Homo sapiens
ttttttcatcaccatagtttttaatgaagaaacttgtttaaaattgtaaaggaaaaaatgggaatgggacggcaaaatcttagcagcaaagtggttaaacaaattgaaaatattaatgcacaaacattaaaatattaa

SEQ ID NO: 471 - DNA, 463 bp, Homo sapiens
  misc_feature (1)...(463): n=a,t,g or c
cgttgtaattatttattctgttactggctgcttagtgtgacatatttgatgttatttcaattgtaatactcttcaaattggaacactccttttctgatattcttagcaaatccctcttttatttttgccacttgttataatatctctaagaagttactccaggaccgggcagtagggattactgattcagatgggtccagtgactagaatatgagtagaaagtgtgaggtctaatttgaacctgtcagagttactgttgcctgcgctggcccaaagtgcagatttttagtcagcttgtgataggccaggtgttttgtctggaccaggagttatctttgacttgtagctagaataaggatcctgagaagtcaggtatccacttgatgtccttttatttgacttgttaccattagtactctcctgggatcaaggctgccaaccgaacctatancccagatttccc

SEQ ID NO: 472 - DNA, 306 bp, Homo sapiens; identical to SEQ ID NO: 60

SEQ ID NO: 473 - DNA, 447 bp, Homo sapiens
  misc_feature (1)...(447): n=a,t,g or c
aactttactcataaaattttatttgaacaaaacaatttttganaatataaaaatttcataagaactgctttcctgttagatacaaaatttattttaaaaataaataattatattgacctttaccatcacttgtctaaattttactcatgtttattgtgaagacacagaggtgaattagaagagtatatcattatacattgtcaaataaagcgaaggtttccttatccaaatagagagaatatatatgtgattacttaatataaagcaaaagctatttctaccaaagaacagacatgcagttattgatctggaattggcatcgattacaaactactctngcaattcttcctctccccaattaaggtgtctctcttgaactggattgaaagctgtttgataagtatacttttttcaagatggtgtgcncagttggggggccttttatta

SEQ ID NO: 474 - DNA, 164 bp, Homo sapiens; identical to SEQ ID NO: 61

SEQ ID NO: 475 - DNA, 510 bp, Homo sapiens
  misc_feature (1)...(510): n=a,t,g or c
ttttttatacaaacaagtttcttttattgtttccacacattcataataactatagaacagaaagattgttttaatttgctgtcctacttcggtgacctgatgaatacactggtaacagtccccagtttgagtaagatcagttgaagcccttactgtataagtccaaaatttaagaaaaatgaatctcacgatgagcttcctcaggcttcggccgtgcgtggaccagtcagcttccgggtgtgactggagcagggcttgtcgtcttcttcagggtcactctgaaagggttgtctgggcttggtcttgcctcccaggtttcacgcgctgcaggttttacatggctgtggtggatccaggctgggattccttctacttcacagcggtgggagggctcagaacgacagctggggtctttccacagtggacacaaagaggtacgttccagttcttgatcaaatngatcactggggagaaaaggtgaactggggagaataantaacaggccattta

SEQ ID NO: 476 - DNA, 348 bp, Homo sapiens
  misc_feature (1)...(348): n=a,t,g or c
nctttttaataatttcagaataaagtctcatttcagtgcagtgggctgggtggtgggggagagggttgaaagccccacttgggtccccgagggtccattgagccctctcaggccagctccaggaatcctgggcctgggtcacagagcagagttgcttgcagggtcctagtggccatcgggctggggcaggacatcatctctcagagggtcagaggctcagagctgggtgcagctcagcaggtcacggccctccaccagctctgggttctcccgcatcatgtgggtgggctgctttttcccccaccaggggcctnagctccagcagctnggtggggtnagcttagcaac

SEQ ID NO: 477 - DNA, 415 bp, Homo sapiens
  misc_feature (1)...(415): n=a,t,g or c
aatatcttagttttttttatttcccttgcaggcaatctctttgaacagaggtttattcaatgaaggaaaggtggagggaagaagggaagaattacaatggttagaaaagagcaactaaagattatttctattatacttctgaacggtaaactagcaattttaataaatattggggtccacttaaatctattaaagcagaaagtgtaaagctatctccattagtgaagagatgaagtgacaaaaaccaatcagtttttgtaggcaactgatttaggaaaatcttgtactgaaatcaacaattagacttgcacatcataggattttcaaatgtttgctgaattggaaaaggantttttccccggggattttttncccccgagggggtccttnttccaatgggggacctccggtntgg

SEQ ID NO: 478 - DNA, 396 bp, Homo sapiens
  misc_feature (1)...(396): n=a,t,g or c
ttttttttttnctgccaaaagcctttaatatgccctggncccaggctgtnttcatgaaaagcggacacagcagtgcttccaacttcaatggttcccaggttcaaggttcctcccagcggaggtgggagggcaagccctcacacctggcacccctgaagtgcatactcctggaggaagtcgttgagctgggacaggctgcccgntggcgtngctccggacaaggctttcagagggcatntcctcgatccagctattcgagtccagcaggtactgggggtttccctcgaggtcataggtggccccatntagacccatgatcaaatattctttcccaggttccaagcgaaggggccaggaggttcgaaccaggnanttncgcatctgattagcagcggc

SEQ ID NO: 479 - DNA, 322 bp, Homo sapiens; identical to SEQ ID NO: 64
  misc_feature (1)...(322): n=a,t,g or c

SEQ ID NO: 480 - DNA, 330 bp, Homo sapiens; identical to SEQ ID NO: 65
  misc_feature (1)...(330): n=a,t,g or c

SEQ ID NO: 481 - DNA, 207 bp, Homo sapiens
  misc_feature (1)...(207): n=a,t,g or c
ctggacagcgggcagcaccaggcggcggacagtgtcttccttctgcaggagcagcgcgnggctctccaccacctcctctccatccttggtccagcgcacctntgcccagggccggcatagctcacaggtcagcaccacacgctccaggcgcacggctgccacatacaccttgccgctgggatacacgatccacgaggagacgtctgt

SEQ ID NO: 482 - DNA, 391 bp, Homo sapiens
  misc_feature (1)...(391): n=a,t,g or c
ttggtatanaagttttttatttcaaaatgcaaaatggtggtcattgtaataattaataataataacataaaaagcatttatccttcctccctagtgcaaaatggtagacgcatttagataattcacacagtgttggaaatgtcatgacaatgcagtgctgcacagagagatactcaatcccaaactcctttggtggatgcttgtggtaggtcagttctagatgtcagcggtttctctgaagttaagtccaaataaaaaacagcacgtgctcctgcactctcccagcggagtcaggctcctgtgcgcgcgccccctctggtctctcccttccttctcggtctgtctctgtctactgcgtntccctcccactccgctggtctcccacagttcc

SEQ ID NO: 483 - DNA, 465 bp, Homo sapiens
  misc_feature (1)...(465): n=a,t,g or c
ttttaaaggnnnnaatgtgactattttaattattttggtggcagggagttggttttacatcacccaaaaaaaaaaaaaaagccctggtttcaaattcattggtaataaatatgctaactttctgaatcaaaatggagagcctctcaagaaaaagagctatgcagtcagcaatgacttaaattagtcaggatagcaggcatctggggttaaggctgtttccaccattttggtctcaccaccatatacgngtgggaccacagctgtgtagcacttgtttcngtcataagtntagcaggtctctgtagcactgtcttcatcacagatattgctctggggtagcagtaactatctgattatcccagctccacttctgtagggncacattttttacagaggtcagacaaatgggtacacaaatctggttccccaatgggtnaggtngggtccagagntattctccccgtt

SEQ ID NO: 484 - DNA, 301 bp, Homo sapiens
  misc_feature (1)...(301): n=a,t,g or c
ggtttaattatgggaaaaagcactaaagttaggtaaatgattttgtttgtcatgcttctcttgacaggcctgtggggggagaatggaaacagagatgccccttggcntgnagntagacacagcttgcagtgcacaggcagaggctctgggtcagtgcaggaagcagagtcaccgccagtgccttgggatggggatcacagaaggtgacctgtggctgcatgagccactgtaggactctgacctcagtgggacaggatgacacaggcagctaggaattctgggcaggggcaggtnggcatta

SEQ ID NO: 485 - DNA, 211 bp, Homo sapiens; identical to SEQ ID NO: 72
  misc_feature (1)...(211): n=a,t,g or c

SEQ ID NO: 486 - DNA, 341 bp, Homo sapiens
ttttttttttaccccagagtatttttattagggattcctgccaccatattaacatataaaacaatctggatgttgacatagaaatgcaaatttcactatacaaaggtaaggctccaatcacagtaacatggcccccatatctctagtatttcaatgaaataaactcattgtgaattcaccccgagttgtgtttataaatattagacaaaccacaaaatatattccaaatacataacattttacaatatttttcaagcacagacaaatacatactttactttacctacattgttttcatgatccaacttgcattagcactaaaggcaatattgtgtgtgtat

SEQ ID NO: 487 - DNA, 376 bp, Homo sapiens
  misc_feature (1)...(376): n=a,t,g or c
agctcatcagctatcgttagtgtattttatgtggcccaagaaaattcttcttcaaatgtggcccagggaagccaaaagtttggacacctgtgatttacaggttatgcctagatctgaaacagatccccatccctcctaaagctcgcccactggttatgggccctgtttctcttagaaacaccacacacatcatttgggaaaagcacactgagtagaaacatggcctgaaagggtggtgggcggtggacctggcttcctgtggccagaggtcagcggacgatagaaatggtctgatcggccacagcaaagacttgggaagattgggccccgggaaggacacattgattgggcacagagcactgtgccggacgngggc

SEQ ID NO: 488 - DNA, 525 bp, Homo sapiens
  misc_feature (1)...(525): n=a,t,g or c
ggtttagcaaaattgttataatttcttttaaataacccacagacacccatcgacacttccaaatttacagagcaaaaaagtgatttgcagctggttcctccagggaattggccccgaagctggctcagttcacctccaggacctcagtctccgggaggccgaacttggtcttgtgcttgtcgaagagcttcaccagggcctccatgtacatggtgtggtacaggtcgatgtcttgctgggttgggtgctccagcttggggatggtgatgggctctcccacaacagtgggtgatgggcttggagtagggcaccagcccccaaggtgtcggaggaagaagaggcctcgaccatggaagatgcatggggcgaaaccaatgtatttctnggaacttcttctgggacccatcggccccaggagccctcctcgaagatcacctgctttgtacactttcattctctcccaaagggggtagatgggaaccaggtcagctcccatgacgcagggcccagttttnaaaaaaagcc

SEQ ID NO: 489 - DNA, 470 bp, Homo sapiens; identical to SEQ ID NO: 76

SEQ ID NO: 490 - DNA, 553 bp, Homo sapiens; identical to SEQ ID NO: 77
  misc_feature (1)...(553): n=a,t,g or c

SEQ ID NO: 491 - DNA, 476 bp, Homo sapiens; identical to SEQ ID NO: 78
  misc_feature (1)...(476): n=a,t,g or c

SEQ ID NO: 492 - DNA, 455 bp, Homo sapiens
  misc_feature (1)...(455): n=a,t,g or c
ttatttccttagtttattaaagatgacaatgaactgccaggctgcacaagcaccacagcaggtggaaacgcagttcagagcacgggcggcacacacggaacatctctactaagactcgcactccttttatgttagttcaacgaaagctctaaatccttggcagagaacgtcaaaaacagcctcatttaagtggaaaatatttgtcttccactcttctgctatgtcttgaatcttgtctccacctggtaagcaaactatgttttttttctttccctttacttacagaaagaacactatcacctgccttcatttagaaggaattctcttcagtgcattcaaagcttctccccngcaacagcagggggattttcagatagtggtaacttgcaaagtgcttccaaaacatcccatcctctacccactttcccccctcttggaataaataactggggngg

SEQ ID NO: 493 - DNA, 580 bp, Homo sapiens; identical to SEQ ID NO: 80
  misc_feature (1)...(580): n=a,t,g or c

SEQ ID NO: 494 - DNA, 473 bp, Homo sapiens
  misc_feature (1)...(473): n=a,t,g or c
ccgataatgactttattttaacatatttaattacagacataaaatagctnnggaggggggtgagccccagcctagccccaccatgggntcatnaggaggggaggcgcagcggggccccctgctgaccctctctctgggggtcttcctatggcggggcctattgcttgagtgggggaggagccatgcaaatgaggggggcagagaagacggtgacacagcggcctccgtgagccacctcgtagccctcgnccttgacttcgtggctncggatgatatagtccaggttgttctcttccaagaaggccttggtgacgtcaggcccaaactgacagctcacgcccgnttgctgattcgagccgccgttctgttggctgtggatctgancaagaacaaggtcacacatggggccctgaatcttgggggttttcgattccgctcaaattttccggatgtcattcanggtganaccggtt

SEQ ID NO: 495 - DNA, 411 bp, Homo sapiens
  misc_feature (1)...(411): n=a,t,g or c
tttntntgcaaagagaaataggctcgtttattnattcattgatcaactggcacttcttgaaancctgctgtgtgccaagcctttccccaaaggaggatatcagtgnnnnagnaagtctcagggtggaaaggacctggaccacacagagcaggactccagagcctcctccatatggcaggaatcaagctttcacaggggaaacgcaggatttcccacacatgcccatgcaacacttcaagtcacgcttgcactggccatccatctcacagaaattgggggggttnagcatcnaacattggccanaantcactnggnacttnccaagggttncnccttgttgggnttnggggggtnnacaggggncccggcanttnatgcnccaagtttcngggcaaanatttcttttttccc

SEQ ID NO: 496 - DNA, 353 bp, Homo sapiens
  misc_feature (1)...(353): n=a,t,g or c
gaagttataaaagcttgtttttctttattagaatacttttttcaattctgatttgtcacaatttagattctttttctaagaataagcagaaatttacaaaatttaatttttatttatacattcatccgttcaatacacatttcaagaaagctgtattgnaccccttnnagtnggtaagttccagggccaaagaaccaaaataaatccaaggagagagaccaacaaatgtatatttataacacagagtaataaaacacaaataaatgtggagttatttaagcatgtaagatggtacatgctctaccaaggtatgggggcttctctaagacacaagatcagattaaagtcttgaa

SEQ ID NO: 497 - DNA, 253 bp, Homo sapiens
  misc_feature (1)...(253): n=a,t,g or c
atagatttcacgtttaatatgtaatggaagctctgtaacatgagacagatagcaagcacggactctgctcactggtcgatgatggagcgctgcaacacctgattcatcatgtcctcttcatcaacatcataatccacaaaagtctcannnngaaaaccggtgccggcgctggatgtgctctctgaagttggcgctgcggnagttgggggtctcccaagggcatcgcggcacatatnggacaanccacagnttt

SEQ ID NO: 498 - DNA, 412 bp, Homo sapiens
  misc_feature (1)...(412): n=a,t,g or c
gcctggtcttgctcagactttgaggagccctcaggcgngtgtcagctgtcgctgatgggccttgtaatcaaacttgtagtaggtgtgcaggatgcgcanaggntagatgcggcagacctcctcggtagtgcccttctcctccaggtagcgctgcacacgctcgatgatggcacacacctgggcctcatccttcaagtgctccacgtactcttgggagtgagggtcangtattntgcattattttggtaaattcttcatccattcgttccaccagagttaggatgcagccacggacacgcanggcttggtcagcgttngttgcaggttctcantctcttccagaatattctgctccaacaaaaatgtttgnggatttggcaaacagggatanccatcagctcattggatgcag

SEQ ID NO: 499 - DNA, 446 bp, Homo sapiens
  misc_feature (1)...(446): n=a,t,g or c
cagagagcaaatcccatttattggaatttcactgacaacaaattgagaggaaggcttccccctcccctgaaacatgccatcctctctgccctcaggntcnagcacagggataagaaccccactccgcatgtccccagaggcagcactccannngggtngggggnaggggaggggtgctctacgccaggctggggagctgggacaggagggaagacgtgcaccctcacctcttggctcaatccctctccccgggacctggtgctgcccccagtccctggggtgngctggnananngggctcatgcaacaattgagtagacaggaggtggcacggaaacgtggccttggtgccccttggcgggggcgggaggactaaaggggccatgctgtggccacagcgggtccaaatggaagtatctgcagtgtacatacaggagggttggagat

SEQ ID NO: 500 - DNA, 394 bp, Homo sapiens
tacttttttttaaaagatttttttgtaaagaagggttgtatttagaggccagtagctagagatccaaccagtggacctcttgaagcactaccaggccttaaggcaccatccgagggagactgggaaaactattattcacccaagcctccggaaatgtaatgtaccagcaggcaaaaaacagttcttcatgtagtacaaaatgaaacgaaacaaaaacaaaaacagaaagtaaaaatgaaaccaaaacatttcttaaattctagtgccatagcttttttgtttgtttgttttttgttgttgttttgttttgttcataagaaagagagaaagatactacttatccgtcagacacatgcatcctcatgtggtcgttgaactgctccgatttggtcaa

SEQ ID NO: 501 - DNA, 346 bp, Homo sapiens
  misc_feature (1)...(346): n=a,t,g or c
ttttttttttttttttttttttaaaagactaatgtaacttcttttaattgtcattttatgctttctgcagctgcccgccaccctcccttcccttggatgaccacttttgtaggctataggggaccagggaacaaaggctgtttgnnnnnngggngggacanannanccccaatcanntgnnnnanannaagctanaattacaaatnnannacaanaantaatgctgannnctgggagagctgcanagnggggaggcccgctcctctttgtcagggtctatttggcagtgaccttgctctgaaggcgatggtactccttcagctgacctnggccaccccggatngaa

SEQ ID NO: 502 - DNA, 234 bp, Homo sapiens
  misc_feature (1)...(234): n=a,t,g or c
gtgatttatttgcaatgggcacagtgatgcaaaaacaagatattaagactataaaatatgtgactacaaagaaccagcgaaataaatacatagatattagatagtccaataacttaaggnncccgtgcaacgatncgagggatccgcgcncacnggaagttcttcttgctgcagggcttggagagcgccggccacgtcctagcctcggtccgactcgtccagcgtatggcccgc

SEQ ID NO: 503 - DNA, 451 bp, Homo sapiens
  misc_feature (1)...(451): n=a,t,g or c
tttgcaatcctcaaaccgtttattgacagcacaaggctcaacagcaggtgagcacgtgagggtgngaagcgcttgnaggcagtgtgggcaccaggcaggggatcccggagaaagccctctgccagggacatggtgagggcgtggcatcaccacgaagggagcataaataacactggcaggtgggtgggcagcaggagagggagagcggacannacacggggacacgcagggtcggcgggaaaatgctgggacagggtcacacggggattcggacacgcagacacagaagggatcatgggacgcccagaggatgccagagggggcagacacaccagagactcggggatgggcatggtgctctgcccgtggtggcccctcctccaatactcgccctgggctttgcaggcaggactgggcggctgagcactctcccagcagagccaagcagggg

SEQ ID NO: 504 - DNA, 437 bp, Homo sapiens
cagttaatttagaaagtttattttgccaaggttgaggacacactgtgacacagactcaggaagtcctgatgacatgtggccaagatggttggggcataccttggttttatacattttagggagacataagacattaatcaatatatgtaagaagaacattggttcagtggggagggagcttccaggtcacagataggtgagacacaaacagttgcattcttttgagtttctgattagcctttccaaaggaggcaatcagatatgtatctatctcagtgagcagagagataactttgaatagagtgggaggtgggtttgccctaagaagtttccctaagcttgagttttccttagtgattctggggccccaagatattttcctgtcacagttgacatccccaacacagtgtttagggctcagaaaaagataccctaaa

SEQ ID NO: 505 - DNA, 565 bp, Homo sapiens
  misc_feature (1)...(565): n=a,t,g or c
ttttttttttttttttaataaaaatctttatttttttattaaaaaagaagtactttggtagctatttaaataagnngggggtgggaatgaatgtcgagatacgagcacctgcatcttttagtcaattgtcagtggagtcggtggggtgctaagtgttctgaactgaagtaggtgcactaaggttccaagctccctgcaaggatctggacgggaggaaagcagaggccctgaagggaaaaaagcctgcttcccaatacttattttttattactgtacaaaaagcacactctccctctttttgtctctcccaccaacggcacccccccacccccaacccaagaggactatacatggagtgcagggacagagttgaccaggaggcctttgtccggcaccctgcccacaggctgagctcagccccaggccctttcaggcatctagacactcccatagcctggtcangctggggcaagggagatnccaggtcacacatacttccctggaagagttggacttaggggtaagagccgggtgcacggtanccagncttgctctcattcccang

SEQ ID NO: 506 - DNA, 440 bp, Homo sapiens
agttataattactttattaaccttttggtctttcaacatttagatagtctttcttaatatttccaggagagtacctcatttttattttgaaaaccattcagcacatttatcttatgtaacatgcagagatattatctatctgtatttttaaaattttcctgttactcattgatacatagtacttaattacatgttattccatgtacactgaaaacaatataggaaatatatacatctaagacttctactttgtacagtctttcattaaataagaatacttacacatacattttcagatatttctaccttcctgtatgtgtttggaattgtatgtaggtagccactgaaagaatttgggccccttgggaggatggcagtggaagtccatgaagtaaagagcattctttaaaaagcagatttgattgcataccttttagtta

SEQ ID NO: 507 - DNA, 427 bp, Homo sapiens
  misc_feature (1)...(427): n=a,t,g or c
tttttttttttcntcccttgnacnataaatttttattggcaggtcagganaagagcngggggtaagggtcccttccttnccatccctctacncanaagacaccctccanagganagnagaagccccagagcctgctgcctcagaggaccttggaggcagacaaattgttgtagtgatcttcctgtccctcgagcaggctgcggttaggtggcaatctcctgctccagccgcgacttgatgtccatgagccgctggtactcctgattctgccgctcactatcagctcgcacatcgcccagctgggttcaataccgctgatcagcgcctggatatgcgccagtgggctccaaagcgcgcctccgtttctgccagtgtgtcttccaaggcagctttcatgctcagctgntgactgcagctcaatctcaag

SEQ ID NO: 508 - DNA, 452 bp, Homo sapiens
  misc_feature (1)...(452): n=a,t,g or c
tttgacaggctccagcgtgctgccatgtgatagaagaatgatttattagaacaaattccatgacaaatcatataaaataaccattttccgaaagacagccacaagaccacctgagaacgaatgtacagtgaaccctccgagaagcccggcaaacaaggaccagttcccaggcaaaggctgganggggaggaacaaaggagctcagtgtggggaggagcaggaacttgtgaacttaaaacattgcacagccactgccgaggggtgggaaggagccgtggatgaagccgtgaccacttcatgtccaggggcaggcggggttggggcaactgggncattgcagggggtgggcagcaagccggttggaccggttaagccacctcctccattacagacaggcaggctcttggggccggggaccaggggggggntcacctgncaacccgggcccccct

SEQ ID NO: 509 - DNA, 291 bp, Homo sapiens
ggccgggcgcggtggctcacgcctgtaatcccagcactttgggaggccgaggcgggtggatcacctgaggtcaggagttcgagaccagcctggccaacatggtgaaaccccgtctctactaaaaatacaaaaattagccgggcgtggtggcgggcgcctgtaatcccagctactcgggaggctgaggcaggagaatcgcttgaacccgggaggcggaggttgcagtgagccgagatcgcgccactgcactccagcctgggcaacaagagcgaaactccgtctcaaaaaaaa

SEQ ID NO: 510 - DNA, 404 bp, Homo sapiens
agttctccaggaatctaatatgggtgctttttaagaagagagccaccggtctcagctaataatacaattttcacaaataaatccaaaatttaaggtaggattaaaaaggagtaaaccaatacataaaaaatgaaattgagaactgatttaatactaaagttctgaataaaggtgtgcactttatgattgattctatctttttgcacaagttggatactccagtttcccatcccaacatgttgttcgcaatgtgtgagaacgtgatgaaagacgatatccccgtttacacacaaattcaactgattcacctgttctcgaataaagcttctgtttggctgtccaccttaatgctatgttataattttccataatttctcgggatattacacacggatgtaagcatt

SEQ ID NO: 511 - DNA, 425 bp, Homo sapiens
tgggggtttttaaggtgccgcatgttctttttagtttccatacatcgtctgtcccagagtgaggagaagttgatctccttcccacatccaccggaggctgcgtgagggaagcctggctccccacaacttgctccttctccagccctgcccctctcaattaaaacaatgctttcttttttcttttcttttttttgagacggagtcttgctctgtcacccgggctggagtgcagtggcgcgatcttggctcactgcaagctccgcctcctgggttcacaccattctccagcctcagcctcccaagctgctgggactacaggcgcccaccaccacgccaagctaattttttgtatttttttagtagagacagggtttcactgtgttagccaggatggtctcaatctcccaaccttgtgatccacccac

SEQ ID NO: 512 - DNA, 328 bp, Homo sapiens
  misc_feature (1)...(328): n=a,t,g or c
ggcatttccccaacatttaatcaggaaaaaacattccatgaacaaagaaaaactcatgcaactaaagaggagagaacggggggtctgggactgtcagacagggccagattcctcagaggaggcagaagacacagagtagtaaggcacggccgccttggccccacagggcgggcactggacggagcgggcgctgaatggggcggctgaaggagtcggagcaggtgcagacaacacttaggacgtttngcagtaggctcaggaggaggagcgttctagggcccccatgccaangtcaggncctggcacaagcctgagtccagtcctccca

SEQ ID NO: 513 - DNA, 216 bp, Homo sapiens
  misc_feature (1)...(216): n=a,t,g or c
ccaagaggcgagtttattgggggaggggctggtcaagtcatcagtgcacactgcatccccgctaagggcaggtcagtccagtgtgtgggccgcgggggtcacaggcatagcagnaggagggggagtnanctacccccacgggnccaccccnagcccagtccaggggtnggagggagggggtgacccctgtcgaggtcctcaggcatctttggctga

SEQ ID NO: 514 - DNA, 325 bp, Homo sapiens
  misc_feature (1)...(325): n=a,t,g or c
gtacaaaactttgaattttttatttgtgaaattaaaaatatggtattatatatatataanctnctatncctctataaatatagatgattttgtgatagngancagaataaatgtataccaaattcaaagaccaatatcattttagcgtatgacagacatagataaatttaggncctaagtaccggcattttgataaattcttaaagtttaaaacantacaatcaggaggattgcttttctcctcttcttcacagagaactaaagtgaatattttttaaatggctttgaaagatttacatgggacacatttctgtaaatccaaaag

SEQ ID NO: 515 - DNA, 178 bp, Homo sapiens
  misc_feature (1)...(178): n=a,t,g or c
cacagatatttttaggttttnagtagtggtcccgtcagacacaggcaaggattcaggctcggcctcccatgcgccaccctcgcccaccacactggggccggagcagggcggtcggctgcagcccccgctacttaaaggtggactgcagctccttgaaggccgntttccgctgcttcat

SEQ ID NO: 516 - DNA, 269 bp, Homo sapiens
cccagggcagtggtgggtgctttatttccatgctgggtgcctgggaagtatgtagacggggtacgtgccaagcatcctcgtgcaaccggagagcccggggaggggctctgcggccgtcgcactcatttacccggggacaggagaggctcttctcgtgtagtggttgtgcagaccttatgcatcacgggcatgagaagacgttcccctgctgccacctgctcttgtccacggtgagcttgctatagaggaagaaggagccgtcggagtcc

SEQ ID NO: 517 - DNA, 494 bp, Homo sapiens
tttaactgagacagggttttgctctgtctctcaggctgaagtacagtggcacaatcctagctcaagcagttagaataggatttttgaacataattaagcacaataaaataggtaaaataaaatacagtattttccttgaatttttatgttaagtatacatatgtatatgtgtgtgtgtatatatatatatttgtgtatttgtgtgtgtgtttcttctttttagagccagggtctcactttctggtccagggtaggagaccacgcagcatgatcacggctacccttgtccagggtaggaggtccagtagcataatcacagctcactgcagccttgacttgctgggcttgagcaatcctcccaggagatcaaggctgcagtaagccataatcatgcaactgtactccagcctgggcaacagggcaagaccctgtctcaaaaaaataagaacaggccaggcacagtggcatttgaaatgaaagataatcagcaaaac

SEQ ID NO: 518 - DNA, 355 bp, Homo sapiens
  misc_feature (1)...(355): n=a,t,g or c
ggtaaagacttttaagagaaagaagtattttaaaaagtagcagtgctctgaggctcagggtgtaggatcgggggcacagcatggtcccgggaggccccttgtgcacaggtggtggcccagggcaagntgtctcgctcttgggggacgcgcggccgggggacgcgtcctgtgtccggcccggggctcccagcgggctccggcggcagggacaatggcaaggccgctcaccacttgaggaagaccatcccggccaggacggtgtagcccagcaccaggaagaggaccttgagcagacggtcactcttctcctccagctccttggccaggatctccaggaaggtgatgaagaggaagg

SEQ ID NO: 519 - DNA, 283 bp, Homo sapiens; identical to SEQ ID NO: 89

SEQ ID NO: 520 - DNA, 409 bp, Homo sapiens
ttttttttttttttttttttttttgggtttgatgattttatttctcccttcccataaccagtaaaaaaaaaaaaaaaaattacaatcaggcctggtggtggctcacgcctgtgatctcagcactttgggaggctgaggtgggcggattgcttgatctcaggagtttgagaccagcctgagcaacacagcgagacctggtctcaaaattattatacaatcaatgcaagtacaaagattcaatttttaaaaatcaccagagtacaaagacggccacagcccctgcccgggtttaacttacatatatacagagtgggcggggcaggcatggccacagaggtggtattacaaaatatacaaagtggtttctttctttacatttcatagaagaagcctgcctcatttccaaatg

SEQ ID NO: 521 - DNA, 545 bp, Homo sapiens
tccttgacagtgtaaacactgacattgtactccaggccgggactcaggttatcaaaagtgcaggagctctgatcagcatggaccacttcttccaaagaatttccctgctggccgtttgtaggggttgtggtaattctataaccagtaatgtctggggtggtgctcctctcccaggagactgtgagcactccagtgtcagggtttgcctccagatgcaagtttgttggtggagacaatggtgtcaccactttgtttacaattggcgcatctctttcctgtccatctctcaggacttggatggtgtagacgtattctactcctggagtcaagccggacacaacgatgcttcctgagtctgaagtcacttctcgtggtgcctctcctccctggcttggtcgtacacccagcttaaaaccaattcttggagcaggcgtccatgtgatcacaatggtggtctcagtcacctcggtgttgtaaggtggaatagagctcccaggctgcagtgtggtagagactccagtggctttggggctctcttggttgcc

SEQ ID NO: 522 - DNA, 376 bp, Homo sapiens
ttattattcatttatttatttattctgagacggagtctcactctgtcgcccaggctgaagtgcagtggcgcgatctcagctcactgcaacctctgcctctagggtccaagcgattctcctgccccagcctccagagcagctgggaccacagacacacaccaccacaccccgccaatctttgcaattccagtagagaccaggcttcaccatattggtcaggccggtccggaactcccgacctcaggggacccacccgccctggcctcccaaagtactgggattacaggagtgaaccaccacacccggctctgcctttctttgacccctcccagactggaccatcttgctactctctccagtcgttttcaccttgatt

SEQ ID NO: 523 - DNA, 315 bp, Homo sapiens
aattattgagacggagccttgcgctgtcaccgaggctggagtgcactggcactgtcttggctcactgcaacctccgcctcccgggttcaagcgattctcctgcctcagcctcccaagtagctgggattacaggcatgtgccaccatgcccagctaatttttgtatttttagtagaggtgaggtttcagcatgttggccaggctggtcttgaactcctgaccttgtcatcctcccaccttggcctcccaaagtgctgggattacaggcgtgacgaccacggccggctgttatgctcatcatggcacttaagagatg

SEQ ID NO: 524 - DNA, 449 bp, Homo sapiens
  misc_feature (1)...(449): n=a,t,g or c
ttgtttattgacatacaggtaggctctatagcaacaggcctggnggtnctgcagtagtgggggaaaatggangncggagggtggggncaggtncaaactggagaggcctagagagctagagangcaagtaaggnccagggcagantcggcttcaatggaacaacagcccagtgccctaaggcccctaactcttgctggctgtttcttgaccccaagccagggttgggagtcctctgggcatccatttttnctaaagganctggacagagtacacacaggaaaggaagctttcaccctcttgccatctggctccaggggcctccagtccagcattcctccttcttcccttnattgggtggggccacatgatgggcagccaggctctgggctgttcccactagagcaggctgcaaacacagccatttttcagtgaggcttgatcttcttna

SEQ ID NO: 525 - DNA, 322 bp, Homo sapiens
  misc_feature (1)...(322): n=a,t,g or c
aattnnaaanacatggctgcatttattgttcccagcccggcgagaaggttttcccagaaaggttccttgggtcacctgcccacccagccttggtctgggctgccatgtccccacgggcaggagagaggcacaagtcacagtcaggcaagggagcctcagcttcctgggcggtggctnttggggtccctccagtnttcacctgggaccctcggccaggttgggacanattccagggaggcgaggttgcatggtccagcggtgggtgcaggtggcaacaggttcggcgggttttgcaggttccaaaaggagntttcgggttggg

SEQ ID NO: 526 - DNA, 281 bp, Homo sapiens
  misc_feature (1)...(281): n=a,t,g or c
gggggagtanggattttattcaggggtggggacaggcgggcggctcagtagcaggtgccgtccacctccgccatgacaacagacacattgacatgggtgggtttacccgccaagcgtcgaatggtnttctgtgtgaaggccagcgnagggcctcgtggcanccatgcaggagaaggtntcccccttnttccagtcctcggntgccacgcgcagtatgntggtcacaggaaggtgggtgggtgccctggctgggnttcctgccgggatgcccaagttcaggt

SEQ ID NO: 527 - DNA, 402 bp, Homo sapiens
  misc_feature (1)...(402): n=a,t,g or c
cgcatgagattattttattaaaaaactcaaaggaagcagagtgtggagcggtatctgtccngcgtgacgtctcacatcggagttggctcagaccctggctgtgcatccatcagaaagtgcaaggcccaggccatgagctggggaggaagcctggnaagaaaccaccgctgcaggtcaatggagcctgggactagtgaccaagagttggggcagacccagggcactcacctgacagcttggacccgagcacagagggacgtgcagggtggctcatactcatactgggaaggcagaaccatcacgatgcctctttggggggttcctgaaaggggtatgggtntctgggggaagagctaacaaggaccccaaccccatccaaggctacccatgctccctnccagg

SEQ ID NO: 528 - DNA, 441 bp, Homo sapiens
tatttttatttacaacagaattggtggctttattcctccatctttagggacacttggcattagcagctagatggaaagtccgcagtgaagtcaaactcattctgccccagccacagctccggaagctcattggctcggtccaaccccagttccaccaccagcgacatcagcacttcctcatccactgggtccgaatcgatgatagcagggctctgggcaccagcagaaggagagagtgattctgcccctcccgcctgggccccaaagtcccagttttgcaggggtcctgcctccccgggttggcctggagtggcagcagcatcccctgatactggctattaagtttctgcagctgcatactagccagcaagtgaggggcggggtgcaggttgaaggattgggggtttagtgggaggggtggttgtaggagagctatttgga

SEQ ID NO: 529 - DNA, 383 bp, Homo sapiens
  misc_feature (1)...(383): n=a,t,g or c
cacaggaacaattcttttattgtacattggagaaatagccctgtgtgctggttcaaggtgcaacatacagaatattgaattaagaaaagagggaacggggaagggaanggaaacctctttgaggtccaaagttgncaacaaaaaatggtaaaagatttcctcacgcaaganggcatttttgcaaataccatgcaaaacaggcagctggtgtgccttaagagaatccctataaataacagaaaagacactccaagcattcctgtacgtggactcagagcacagagaaaagaaactaaaatgccttttggatttcaagatatttggcactcttgtgattacatttttttacagtccattaaaggggaataaactgacataatatt

SEQ ID NO: 530 - DNA, 488 bp, Homo sapiens; identical to SEQ ID NO: 91
  misc_feature (1)...(488): n=a,t,g or c

SEQ ID NO: 531 - DNA, 435 bp, Homo sapiens
  misc_feature (1)...(435): n=a,t,g or c
ttttacatgagatattcaacattttattataaaacaggctttctgttagatgattttgctcaactttaggtgttctgagcatgtttaaggtaggctaggctaagccatgatgtttagtaggttaggggtattaagtgcattttcaaattaccatattttcaacttacaatagtttcaacgggaggtaaccccatcgtaagtggaggaacatctagtgcctggcacacgagccggttctcaataaatataactcttctccatcttcttcaaacctcaggccaggtttcagtgacctcctctcactttctaagattatttttgcttgctggtgggtttactgtcatttttaaccacatctaacctaccttaaaaaagtgtatggatgggggtgccaggtacaaagacttagcataangaaaacgaccatttactttg

SEQ ID NO: 532 - DNA, 366 bp, Homo sapiens
  misc_feature (1)...(366): n=a,t,g or c
ttttgagagctgatgacagacaacagcaagctactttacagaatctaccaactgggtaggaaagtcttctgagtttctttgcagacaagaaaagttacctgttgattgttggccaatcaataagggactttcctctctgccattaagagcaacgatgctgaccacatactctgtgcctggagtgaggttggtgagggtgatggaattccgagagtggggcacccgatcttctcgaggtctcccactgaagtgctcgggatgatggcggatcctgtagccagtgatggtggctcgaggagcaatccagtgcacagtaaaagagttggcagtaatatccagaaaagtcaatacccatttggggantca

SEQ ID NO: 533 - DNA, 362 bp, Homo sapiens
  misc_feature (1)...(362): n=a,t,g or c
tttttccagctcaacccttctttaatgtcatccagggaggggncanggnttggaggggaggggttgaggagcgngaggangttatttttgggtggnnttaccacttttcccatgaagaggggaaacttggtattttgttcaatcattaagaagacaaagggtttnttgaacttgacctcgggggggatagacatgggtatggcctctaaaaacatggccccagcagcttcagtccctttctcgtcgatggtcaagcacaaccttattgcacggcttggangagcttcaggggtgctcctctgtgaccccggagaggtcaagccccattnctgaagaccttagtgatgcccagttgacccagg

SEQ ID NO: 534 - DNA, 364 bp, Homo sapiens
  misc_feature (1)...(364): n=a,t,g or c
tttttttttttttttttttttgctttaagttctttattacagttggattaacactaccacactgaatatactgaattaactattcaaccctttcatccattcagcaaatttaaaactcttgccaagtatcatgaacttacgaagaggagataagagatctgatcttttctgtaggtattccatctccagtttgtcatatctttcccgattactgggatttatccacaganttaggctgaggaaacataaccatccgggggaggcantcgatcagggggctaccaggctagctcgggtcacggatgttttcggagggtttggctggtctggcctgtgggggattaaggcccacctttcaggggga

SEQ ID NO: 535 - DNA, 317 bp, Homo sapiens
  misc_feature (1)...(317): n=a,t,g or c
gcccatgcatggaatttattgtgtgctactgtttanaaaanactcgaatagnccngcacangcataatatttccaacttagncaggggaccatacagggggcactttctggcaaacaaaacaatagntggttccgctgcctgaagctctgagntgtattccagggcatgagggaagcaggccaccaaagtaaaggggaataccaaactacagtggcaatcaatacagggcaataattgtgaaaaattagcacatggttccctttagtttaaccaagcagttcagtaactatcaaaaggaaaggtttcaaccatgcag

SEQ ID NO: 536 - DNA, 445 bp, Homo sapiens
  misc_feature (1)...(445): n=a,t,g or c
ttctggttgtcaatgaggatatttattggggtttcatgagtgcagggagaagggctggatgacttgggatggggagagagacccctcccctgggatccctgcagctccagggtnccgtgggtngggttagagttgggaacctatgaacattctntaggggccactntcttctccacggtgctcccttcatgcgtgacctggcanctntagcttctgtgggacttccactgctcgggcgtcaggctcaggtagctgctggccgcgtacttnttgttgctctgtttggagggtttggtggtctccactcccnccttnacggggctgccatctgccttccagggcactntcacagctcccgggtagaagtcactgatcagacacactagtgtggccttgttggcttggagctcctcagagganggcgggaacagagttacagtgggga

SEQ ID NO: 537 - DNA, 385 bp, Homo sapiens
  misc_feature (1)...(385): n=a,t,g or c
cagctcacaagacagttttattgaattagttgcatgcagganaattctgttcttccatgagcagcagagtcgagtgttagagtgcaggnccagagcggggagaggctggnggagttggggnctggagntggggctggttacttggtgacgtgcagantctctctggggggctgcagctcatcttggggggagctggactcagatgcccccgtangtgcaaaagcaacatccacatctcactcctcccggtgctttttgcggtattcctgcagcgtttctccgccacggtctccataaatttagggttcttcctgggagacttctacagggaccgtcacagtgatgggatcagagtcaaagagcttcacgaccacctcagtgacac

SEQ ID NO: 538 - DNA, 375 bp, Homo sapiens
  misc_feature (1)...(375): n=a,t,g or c
tcgcagcaattttaattcaatcccacgcccctgtccagcaggaaacccctttatagaaaacccaaatcctcatcttggagtttctccttcagccagggcagcacttgaaagaggttgatgtgaaagtctcgggcgtgannggttacctgcttttgccgnttctggtttttgcagacatccactactccccagctgattacaccaacttgaatgaaacganttctcttgtgaactatcaaggggccgccagantcacctntgcaagtnttggggtcagcatagggactcactcctccagtacaaagggaaccgaggggtgaccacctntgaggatgtcccttgantttgtcatagcctgggggcaatatttgaggc

SEQ ID NO: 539 - DNA, 420 bp, Homo sapiens
  misc_feature (1)...(420): n=a,t,g or c
ttctccttttccngttcccaagacatgtgcagctcatcatctggccattttctccctgacggtcccacttctctccaatcttgtagttcacaccattgtcatggcaccatctagatgaatcacatctgaaatgaccacttccaaagcctaagcactggcacaacagtttaaagcctgattcagacattcgttcccactcatctccaacggcataatgggaaactgtgtaggggtcaaagcacgagtcatccgtaggttgggttcaagccttcgttgacagagttgcccacgggtaacaacctntttcccgaaccttatgcctctgctgggtcttttcaggtgcctccacttatggatgttgtagggtggggcacctctgggtnagggggcctgtcagaggtggggcactgggtaggaagg

SEQ ID NO: 540 - DNA, 1201 bp, Homo sapiens; identical to SEQ ID NO: 94

SEQ ID NO: 541 - DNA, 760 bp, Homo sapiens; identical to SEQ ID NO: 95

SEQ ID NO: 542 - DNA, 1105 bp, Homo sapiens
gcgccgcgactcgtgcgggtaggcgtctgcgctcggtttgagggctcggcgcggggtttcctgttccttcttctgcgcggctgcagctcgggacttcggcctgacccagcccccatggcttcagaagagctacagaaagatctagaagaggtaaaggtgttgctggaaaaggctactaggaaaagagtacgtgatgcccttacagctgaaaaatccaagattgagacagaaatcaagaacaagatgcaacagaaatcacagaagaaagcagaacttcttgataatgaaaaaccagctgctgtggttgctcccattacaacgggctatacggtgaaaatcagtaattatggatgggatcagtcagataagtttgtgaaaatctacattaccttaactggagttcatcaagttcccactgagaatgtgcaggtgcatttcacagagaggtcatttgatcttttggtaaagaatctaaatgggaagagttactccatgattgtgaacaatctcttgaaacccatctctgtggaaggcagttcaaaaaaagtcaagactgatacagttcttatattgtgtagaaagaaagtggaaaacacaaggtgggattacctgacccaggttgaaaaggagtgcaaagaaaaagagaagccctcctatgacactgaaacagatcctagtgagggattgatgaatgttctaaagaaaatttatgaagatggagacgatgatatgaagcgaaccattaataaagcctgggtggaatcaagagagaagcaagccaaaggagacacggaattttgagactttaaagtcgttttgggaactgtgatgtgatgtggaaatactgatgtttccagtaagggaatattggtgagctgcatatataaatttgacagatagctatttacatagccttctaagtaaaggcaatgaattctccatttcctactggaggatttatttaaataaaatatgcttattaaacactcctgcaaagatggttttattagtaccctggtcattttgttcaaggaagggttatattgcattctcacgtgaaatataaaaagcaagtcttgcccaataaaaacgctacattgtgtgt

SEQ ID NO: 543 - DNA, 2497 bp, Homo sapiens
gggcgccgaggctccccgccgctcgctgctccccggcccgcgccatgccctcctacacggtcaccgtggccactggcagccagtggttcgccggcactgacgactacatctacctcagcctcgtgggctcggcgggctgcagcgagaagcacctgctggacaagcccttctacaacgacttcgagcgtggcgcggtggattcatacgacgtgactgtggacgaggaactgggcgagatccagctggtcagaatcgagaagcgcaagtactggctgaatgacgactggtacctgaagtacatcacgctgaagacgccccacggggactacatcgagttcccctgctaccgctggatcaccggcgatgtcgaggttgtcctgagggatggacgcgcaaagttggcccgagatgaccaaattcacattctcaagcaacaccgacgtaaagaactggaaacacggcaaaaacaatatcgatggatggagtggaaccctggcttccccttgagcatcgatgccaaatgccacaaggatttaccccgtgatatccagtttgatagtgaaaaaggagtggactttgttctgaattactccaaagcgatggagaacctgttcatcaaccgcttcatgcacatgttccagtcttcttggaatgacttcgccgactttgagaaaatctttgtcaagatcagcaacactatttctgagcgggtcatgaatcactggcaggaagacctgatgtttggctaccagttcctgaatggctgcaaccctgtgttgatccggcgctgcacagagctgcccgagaagctcccggtgaccacggagatggtagagtgcagcctggagcggcagctcagcttggagcaggaggtccagcaagggaacattttcatcgtggactttgagctgctggatggcatcgatgccaacaaaacagacccctgcacactccagttcctggccgctcccatctgcttgctgtataagaacctggccaacaagattgtccccattgccatccagctcaaccaaatcccgggagatgagaaccctattttcctcccttcggatgcaaaatacgactggcttttggccaaaatctgggtgcgttccagtgacttccacgtccaccagaccatcacccaccttctgcgaacacatctggtgtctgaggtttttggcattgcaatgtaccgccagctgcctgctgtgcaccccattttcaagctgctggtggcacacgtgagattcaccattgcaatcaacaccaaggcccgtgagcagctcatctgcgagtgtggcctctttgacaaggccaacgccacagggggcggtgggcacgtgcagatggtgcagagggccatgaaggacctgacctatgcctccctgtgctttcccgaggccatcaaggcccggggcatggagagcaaagaagacatcccctactacttctaccgggacgacgggctcctggtgtgggaagccatcaggacgttcacggccgaggtggtagacatctactacgagggcgaccaggtggtggaggaggacccggagctgcaggacttcgtgaacgatgtctacgtgtacggcatgcggggccgcaagtcctcaggcttccccaagtcggtcaagagccgggagcagctgtcggagtacctgaccgtggtgatcttcaccgcctccgcccagcacgccgcggtcaacttcggccagtacgactggtgctcctggatccccaatgcgcccccaaccatgcgagccccgccaccgactgccaagggcgtggtgaccattgagcagatcgtggacacgctgcccgaccgcggccgctcctgctggcatctgggtgcagtgtgggcgctgagccagttccaggaaaacgagctgttcctgggcatgtacccagaagagcattttatcgagaagcctgtgaaggaagccatggcccgattccgcaagaacctcgaggccattgtcagcgtgattgctgagcgcaacaagaagaagcagctgccatattactacttgtccccagaccggattccgaacagtgtggccatctgagcacactgccagtctcactgtgggaaggccagctgccccagccagatggactccagcctgcctggcaggctgtctggccaggcctcttggcagtcacatctcttcctccgaggccagtacctttccatttattctttgatcttcagggaactgcatagattgtatcaaagtgtaaacaccatagggacccattctacacagagcaggactgcacaggcgtcctgtccacacccagctcagcatttccacaccaagcagcaacagcaaatcacgaccactgatagatgtctattcttgttggagacatgggatgattattttctgttctatttgtgcttagtccaattccttgcacatagtaggtacccaattcaattactattgaatgaattaagaattggttgccataaaaataaatcagttcattt

SEQ ID NO: 544 - DNA, 1371 bp, Homo sapiens
  misc_feature (1)...(1371): n=a,t,g or c
ctgcaggggggggggggggctgggacagtgaatcgacaatgccgtcttctgtctcgtggggcatcctcctgctggcaggcctgtgctgcctggtccctgtctccctggctgaggatccccagggagatgctgcccagaagacagatacatcccaccatgatcaggatcacccaaccttcaacaagatcacccccaacctggctgagttcgccttcagcctataccgccagctggcacaccagtccaacagcaccaatatcttcttctccccagtgagcatcgctacagcctttgcaatgctctccctggggaccaaggctgacactcacgatgaaatcctggagggcctgaatttcaacctcacggagattccggaggctcagatccatgaaggcttccaggaactcctccgtaccctcaaccagccagacagccagctccagctgaccaccggcaatggcctgttcctcagcgagggcctgaagctagtggataagtttttggaggatgttaaaaagttgtaccactcagaagccttcactgtcaacttcggggacaccgaagaggccaagaaacagatcaacgattacgtggagaagggtactcaagggaaaattgtggatttggtcaaggagcttgacagagacacagtttttgctctggtgaattacatcttctttaaaggcaaatgggagagaccctttgaagtcaaggacaccgaggaagaggacttccacgtggaccaggtgaccaccgtgaaggtgcctatgatgaagcgtttaggcatgtttaacatccagcactgtaagaagctgtccagctgggtgctgctgatgaaatacctgggcaatgccaccgccatcttcttcctgcctgatgaggggaaactacagcacctggaaaatgaactcacccacgatatcatcaccaagttcctggaaaatgaagacagaaggtctgccagcttacatttacccaaactgtccattactggaacctatgatctgaagagcgtcctgggtcaactgggcatcactaaggtcttcagcaatggggctgacctctccggggtcacagaggaggcacccctgaagctctccaaggccgtgcataaggctgtgctgaccatcgacgagaaagggactgaagctgctggggccatgtttttagaggccatacccatgtctatcccccccgaggtcaagttcaacaaaccctttgtcttcttaatgattgaacaaaataccaagtctcccctcttcatgggaaaagtggtgaatcccacccaaaaataactgcctctcgctcctcaacccctcccctccatccctggccccctccctggatgacattaaagaagggttgagctgg

SEQ ID NO: 545 - DNA, 1352 bp, Homo sapiens
  misc_feature (1)...(1352): n=a,t,g or c
ctgggacagtgaatcgacaatgccgtcttctgtctcgtggggcatcctcctgctggcaggcctgtgctgcctggtccctgtctccctggctgaggatccccagggagatgctgcccagaagacagatacatcccaccatgatcaggatcacccaaccttcaacaagatcacccccaacctggctgagttcgccttcagcctataccgccagctggcacaccagtccaacagcaccaatatcttcttctccccagtgagcatcgctacagcctttgcaatgctctccctggggaccaaggctgacactcacgatgaaatcctggagggcctgaatttcaacctcacggagattccggaggctcagatccatgaaggcttccaggaactcctccgtaccctcaaccagccagacagccagctccagctgaccaccggcaatggcctgttcctcagcgagggcctgaagctagtggataagtttttggaggatgttaaaaagttgtaccactcagaagccttcactgtcaacttcggggacaccgaagaggccaagaaacagatcaacgattacgtggagaagggtactcaagggaaaattgtggatttggtcaaggagcttgacagagacacagtttttgctctggtgaattacatcttctttaaaggcaaatgggagagaccctttgaagtcaaggacaccgaggaagaggacttccacgtggaccaggtgaccaccgtgaaggtgcctatgatgaagcgtttaggcatgtttaacatccagcactgtaagaagctgtccagctgggtgctgctgatgaaatacctgggcaatgccaccgccatcttcttcctgcctgatgaggggaaactacagcacctggaaaatgaactcacccacgatatcatcaccaagttcctggaaaatgaagacagaaggtctgccagcttacatttacccaaactgtccattactggaacctatgatctgaagagcgtcctgggtcaactgggcatcactaaggtcttcagcaatggggctgacctctccggggtcacagaggaggcacccctgaagctctccaaggccgtgcataaggctgtgctgaccatcgacgagaaagggactgaagctgctggggccatgtttttagaggccatacccatgtctatcccccccgaggtcaagttcaacaaaccctttgtcttcttaatgattgaacaaaataccaagtctcccctcttcatgggaaaagtggtgaatcccacccaaaaataactgcctctcgctcctcaacccctcccctccatccctggccccctccctggatgacattaaagaagggttgagctgg

SEQ ID NO: 546 - DNA, 5067 bp, Homo sapiens
ctcctccccatcctctccctctgtccctctgtccctctgaccctgcactgtcccagcaccatgggacccacctcaggtcccagcctgctgctcctgctactaacccacctccccctggctctggggagtcccatgtactctatcatcacccccaacatcttgcggctggagagcgaggagaccatggtgctggaggcccacgacgcgcaaggggatgttccagtcactgttactgtccacgacttcccaggcaaaaaactagtgctgtccagtgagaagactgtgctgacccctgccaccaaccacatgggcaacgtcaccttcacgatcccagccaacagggagttcaagtcagaaaaggggcgcaacaagttcgtgaccgtgcaggccaccttcgggacccaagtggtggagaaggtggtgctggtcagcctgcagagcgggtacctcttcatccagacagacaagaccatctacacccctggctccacagttctctatcggatcttcaccgtcaaccacaagctgctacccgtgggccggacggtcatggtcaacattgagaacccggaaggcatcccggtcaagcaggactccttgtcttctcagaaccagcttggcgtcttgcccttgtcttgggacattccggaactcgtcaacatgggccagtggaagatccgagcctactatgaaaactcaccacagcaggtcttctccactgagtttgaggtgaaggagtacgtgctgcccagtttcgaggtcatagtggagcctacagagaaattctactacatctataacgagaagggcctggaggtcaccatcaccgccaggttcctctacgggaagaaagtggagggaactgcctttgtcatcttcgggatccaggatggcgaacagaggatttccctgcctgaatccctcaagcgcattccgattgaggatggctcgggggaggttgtgctgagccggaaggtactgctggacggggtgcagaacctccgagcagaagacctggtggggaagtctttgtacgtgtctgccaccgtcatcttgcactcaggcagtgacatggtgcaggcagagcgcagcgggatccccatcgtgacctctccctaccagatccacttcaccaagacacccaagtacttcaaaccaggaatgccctttgacctcatggtgttcgtgacgaaccctgatggctctccagcctaccgagtccccgtggcagtccagggcgaggacactgtgcagtctctaacccagggagatggcgtggccaaactcagcatcaacacacaccccagccagaagcccttgagcatcacggtgcgcacgaagaagcaggagctctcggaggcagagcaggctaccaggaccatgcaggctctgccctacagcaccgtgggcaactccaacaattacctgcatctctcagtgctacgtacagagctcagacccggggagaccctcaacgtcaacttcctcctgcgaatggaccgcgcccacgaggccaagatccgctactacacctacctgatcatgaacaagggcaggctgttgaaggcgggacgccaggtgcgagagcccggccaggacctggtggtgctgcccctgtccatcaccaccgacttcatcccttccttccgcctggtggcgtactacacgctgatcggtgccagcggccagagggaggtggtggccgactccgtgtgggtggacgtcaaggactcctgcgtgggctcgctggtggtaaaaagcggccagtcagaagaccggcagcctgtacctgggcagcagatgaccctgaagatagagggtgaccacggggcccgggtggtactggtggccgtggacaagggcgtgttcgtgctgaataagaagaacaaactgacgcagagtaagatctgggacgtggtggagaaggcagacatcggctgcaccccgggcagtgggaaggattacgccggtgtcttctccgacgcagggctgaccttcacgagcagcagtggccagcagaccgcccagagggcagaacttcagtgcccgcagccagccgcccgccgacgccgttccgtgcagctcacggagaagcgaatggacaaagtcggcaagtaccccaaggagctgcgcaagtgctgcgaggacggcatgcgggagaaccccatgaggttctcgtgccagcgccggacccgtttcatctccctgggcgaggcgtgcaagaaggtcttcctggactgctgcaactacatcacagagctgcggcggcagcacgcgcgggccagccacctgggcctggccaggagtaacctggatgaggacatcattgcagaagagaacatcgtttcccgaagtgagttcccagagagctggctgtggaacgttgaggacttgaaagagccaccgaaaaatggaatctctacgaagctcatgaatatatttttgaaagactccatcaccacgtgggagattctggctgtcagcatgtcggacaagaaagggatctgtgtggcagaccccttcgaggtcacagtaatgcaggacttcttcatcgacctgcggctaccctactctgttgttcgaaacgagcaggtggaaatccgagccgttctctacaattaccggcagaaccaagagctcaaggtgagggtggaactactccacaatccagccttctgcagcctggccaccaccaagaggcgtcaccagcagaccgtaaccatcccccccaagtcctcgttgtccgttccatatgtcatcgtgccgctaaagaccggcctgcaggaagtggaagtcaaggctgccgtctaccatcatttcatcagtgacggtgtcaggaagtccctgaaggtcgtgccggaaggaatcagaatgaacaaaactgtggctgttcgcaccctggatccagaacgcctgggccgtgaaggagtgcagaaagaggacatcccacctgcagacctcagtgaccaagtcccggacaccgagtctgagaccagaattctcctgcaagggaccccagtggcccagatgacagaggatgccgtcgacgcggaacggctgaagcacctcattgtgaccccctcgggctgcggggaacagaacatgatcggcatgacgcccacggtcatcgctgtgcattacctggatgaaacggagcagtgggagaagttcggcctagagaagcggcagggggccttggagctcatcaagaaggggtacacccagcagctggccttcagacaacccagctctgcctttgcggccttcgtgaaacgggcacccagcacctggctgaccgcctacgtggtcaaggtcttctctctggctgtcaacctcatcgccatcgactcccaagtcctctgcggggctgttaaatggctgatcctggagaagcagaagcccgacggggtcttccaggaggatgcgcccgtgatacaccaagaaatgattggtggattacggaacaacaacgagaaagacatggccctcacggcctttgttctcatctcgctgcaggaggctaaagatatttgcgaggagcaggtcaacagcctgccaggcagcatcactaaagcaggagacttccttgaagccaactacatgaacctacagagatcctacactgtggccattgctggctatgctctggcccagatgggcaggctgaaggggcctcttcttaacaaatttctgaccacagccaaagataagaaccgctgggaggaccctggtaagcagctctacaacgtggaggccacatcctatgccctcttggccctactgcagctaaaagactttgactttgtgcctcccgtcgtgcgttggctcaatgaacagagatactacggtggtggctatggctctacccaggccaccttcatggtgttccaagccttggctcaataccaaaaggacgcccctgaccaccaggaactgaaccttgatgtgtccctccaactgcccagccgcagctccaagatcacccaccgtatccactgggaatctgccagcctcctgcgatcagaagagaccaaggaaaatgagggtttcacagtcacagctgaaggaaaaggccaaggcaccttgtcggtggtgacaatgtaccatgctaaggccaaagatcaactcacctgtaataaattcgacctcaaggtcaccataaaaccagcaccggaaacagaaaagaggcctcaggatgccaagaacactatgatccttgagatctgtaccaggtaccggggagaccaggatgccactatgtctatattggacatatccatgatgactggctttgctccagacacagatgacctgaagcagctggccaatggtgttgacagatacatctccaagtatgagctggacaaagccttctccgataggaacaccctcatcatctacctggacaaggtctcacactctgaggatgactgtctagctttcaaagttcaccaatactttaatgtagagcttatccagcctggagcagtcaaggtctacgcctattacaacctggaggaaagctgtacccggttctaccatccggaaaaggaggatggaaagctgaacaagctctgccgtgatgaactgtgccgctgtgctgaggagaattgcttcatacaaaagtcggatgacaaggtcaccctggaagaacggctggacaaggcctgtgagccaggagtggactatgtgtacaagacccgactggtcaaggttcagctgtccaatgactttgacgagtacatcatggccattgagcagaccatcaagtcaggctcggatgaggtgcaggttggacagcagcgcacgttcatcagccccatcaagtgcagagaagccctgaagctggaggagaagaaacactacctcatgtggggtctctcctccgatttctggggagagaagcccaacctcagctacatcatcgggaaggacacttgggtggagcactggcctgaggaggacgaatgccaagacgaagagaaccagaaacaatgccaggacctcggcgccttcaccgagagcatggttgtctttgggtgccccaactgaccacacccccattcc

SEQ ID NO: 547 - DNA, 1488 bp, Homo sapiens; identical to SEQ ID NO: 97

SEQ ID NO: 548 - DNA, 1517 bp, Homo sapiens
gaattccggcgagtgcgcgctcctcctcgcccgccgctaggtccatcccggcccagccaccatgtccatccacttcagctccccggtattcacctcgcgctcagccgccttctcgggccgcggcgcccaggtgcgcctgagctccgctcgccccggcggccttggcagcagcagcctctacggcctcggcgcctcgcggccgcgcgtggccgtgcgctctgcctatgggggcccggtgggcgccggcatccgcgaggtcaccattaaccagagcctgctggccccgctgcggctggacgccgacccctccctccagcgggtgcgccaggaggagagcgagcagatcaaagccctcaacaacaagtttgcctccttcatcgacaaggtgcggtttctggagcagcagaacaagctgctggagaccaagtggacgctgctgcaggagcagaagtcggccaagagcagccgcctcccagacatctttgaggcccagattgctggccttcggggtcagcttgaggcactgcaggtggatgggggccgcctggagcaggggctgcggacgatgcaggatgtggtggaggacttcaagaataagtacgaagatgaaattaaccgccgcacagctgctgagaatgagtttgtggtcctgaagaaggatgtggatgctgcctacatgagcaaggtggagctggaggccaaggtggatgccctgaatgatgagatcaacttcctcaggaccctcaatgagacggagttgacagagctgcagtcccagatctccgacacatctgtggtgctgtccatggacaacagtcgctccctggacctggacggcatcatcgctgaggtcaaggcacagtatgaggagatggccaaatgcagccgggctgaggctgaagcctggtaccagaccaagtttgagaccctccaggcccaggctgggaagcatggggacgacctccggaatacccggaatgagatttcagagatgaaccgggccatccagaggctgcaggctgagatcgacaacatcaagaaccagcgtgccaagttggaggccgccattgccgaggctgaggagtgtggggagctggcgctcaaggatgctcgtgccaagcaggaggagctggaagccgccctgcagcgggccaagcaggatatggcacggcagctgcgtgagtaccaggaactcatgagcgtgaagctggccctggacatcgagatcgccacctaccgcaagctgctggagggcgaggagagccggttggctggagatggagtgggagccgtgaatatctctgtgatgaattccactggtggcagtagcagtggcggtggcattgggctgaccctcgggggaaccatgggcagcaatgccctgagcttctccagcagtgcgggtcctgggctcctgaaggcttattccatccggaccgcatccgccagtcgcaggagtgcccgcgactgagccgcctcccaccactccactcctccagccaccacccacaatcaca

SEQ ID NO: 549 - DNA, 1493 bp, Homo sapiens
gaattccggcgagtgcgcgctcctcctcgcccgccgctaggtccatcccggcccagccaccatgtccatccacttcagctccccggtattcacctcgcgctcagccgccttctcgggccgcggcgccaggtgcgcctgagctccgctcgccccggcggccttggcagcagcagcctctacggcctcggcgcctcgcggccgcgcgtggccgtgcgctctgcctatgggggcccggtgggcgccggcatccgcgaggtcaccattaaccagagcctgctggccccgctgcggctggacgccgacccctccctccagcgggtgcgccaggaggagagcgagcagatcaaagccctcaacaacaagtttgcctccttcatcgacaaggtggggtttctggagcagcagaacaagctgctggagaccaagtggacgctgctgcaggagcagaagtcggccaagagcagccgcctcccagacatctttgaggcccagattgctggccttcggggtcagcttgaggcactgcaggtggatgggggccgcctggagcaggggctgcggacgatgcaggatgtggtggaggacttcaagaataagtacgaagatgaaattaaccgccgcacagctgctgagaatgagtttgtggtcctgaagaaggatgtggatgctgcctacatgagcaaggtggagctggaggccaaggtggatgccctgaatgatgagatcaacttcctcaggaccctcaatgagacggagttgacagagctgcagtcccagatctccgacacatctgtggtgctgtccatggacaacagtcgctccctggacctggacggcatcatcgctgaggtcaaggcacagtatgaggagatggccaaatgcagccgggctgaggctgaagcctggtaccagaccaagtttgagaccctccaggcccaggctgggaagcatggggacgacctccggaatacccggaatgagatttcagagatgaaccgggccatccagaggctgcaggctgagatcgacaacatcaagaaccagcgtgccaagttggaggccgccattgccgaggctgaggagtgtggggagctggcgctcaaggatgctcgtgccaagcaggaggagctggaagccgccctgcagcgggccaagcaggatatggcacggcagctgcgtgagtaccaggaactcatgagcgtgaagctggccctggacatcgagatcgccacctaccgcaagctgctggagggcgaggagagccggttggctggagatggagtgggagccgtgaatatctctgtgatgaattccactggtggcagtagcagtggcggtggcattgggctgaccctcgggggaaccatgggcagcaatgccctgagcttctccagcagtgcgggtcctgggctcctgaaggcttattccatccggaccgcatccgccagtcgcaggagtgcccgcgactgagccgcctcccaccactccactcc

SEQ ID NO: 550 - DNA, 3344 bp, Homo sapiens
gaattccgaagacgcaaaagcagaaacccctgataaaaccatcagacttcatgagacttattcaccaccatgagaacagtatgggggaaaccaccccagtgattcaattttctcccaccagttgcctcccacaacatgtggcaattatgggagttcaattaaagatgagatttggatggggacacagagccaaaccatatcaagtacaaagaaaagagtctcataagatgcaagtgaggaagagttttgtcaaagcaacaggcttcacaagtcctggttaggaagcgtcgtgcaaattctttacttgaagaaaccaaacagggtaatcttgaaagagaatgcatcgaagaactgtgcaataaagaagaagccagggaggtctttgaaaatgacccggaaacggattatttttatccaaaatacttagtttgtcttcgctcttttcaaactgggttattcactgctgcacgtcagtcaactaatgcttatcctgacctaagaagctgtgtcaatgccattccagaccagtgtagtcctctgccatgcaatgaagatggatatatgagctgcaaagatggaaaagcttcttttacttgcacttgtaaaccaggttggcaaggagaaaagtgtgaatttgacataaatgaatgcaaagatccctcaaatataaatggaggttgcagtcaaatttgtgataatacacctggaagttaccactgttcctgtaaaaatggttttgttatgctttcaaataagaaagattgtaaagatgtggatgaatgctctttgaagccaagcatttgtggcacagctgtgtgcaagaacatcctaggagattttgaatgtgaatgccccgaaggctacagatataatctcaaatcaaagtcttgtgaagatatagatgaatgctctgagaacatgtgtgctcagctttgtgtcaattaccctggaggtcacacttgctattgtgatgggaagaaaggattcaaacttgcccaagatcagaagagttgtgaggttgtttcagtgtgccttcccttgaaccttgacacaaagtatgaattactttacttggcggagcagtttgcaggggttgttttatatttaaaatttcgtttgccagaaatcagcagattttcagcagaatttgatttccggacatatgattcagaaggcgtgatactgtacgcagaatctatctatcactcagcgtggctcctgattgcacttcgtggtggaaagattgaagttcagcttaagaatgaacatacatccaaaatcacaactggaggtgatgttattaataatggtctatggaatatggtgtctgtggaagaattagaacatagtattagcattaaaatagctaaagaagctgtgatggatataaataaacctggacccctttttaagccggaaaatggattgctggaaaccaaagtatactttgcaggattccctcggaaagtggaaagtgaactcattaaaccgattaaccctcgtctagatggatgtatacgaagctggaatttgatgaagcaaggagcttctggaataaaggaaattattcaagaaaaacaaaataagcattgcctggttactgtggagaagggctcctactatcctggttctggaattgctcaatttcacatagattataataatgtatccagtgctgagggttggcatgtaaatgtgaccttgaatattcgtccatccacgggcactggtgttatgcttgccttggtttctggtaacaacacagtgccctttgctgtgtccttggtggactccacctctgaaaaatcacaggatattctgttatctgttgaaaatactgtaatatatcggatacaggccctaagtctatgttccgatcaacaatctcatctggaatttagagtcaacagaaacaatctggagttgtcgacaccacttaaaatagaaaccatctcccatgaagaccttcaaagacaacttgccgtcttggacaaagcaatgaaagcaaaagtggccacatacctgggtggccttccagatgttccattcagtgccacaccagtgaatgccttttataatggctgcatggaagtgaatattaatggtgtacagttggatctggatgaagccatttctaaacataatgatattagagctcactcatgtccatcagtttggaaaaagacaaagaattcttaaggcatcttttctctgcttataataccttttccttgtgtgtaattatacttatgtttcaataacagctgaagggttttatttacaatgtgcagtctttgattattttgtggtcctttcctgggatttttaaaaggtcctttgtcaaggaaaaaattctgttgtgatataaatcacagtaaagaaattcttacttctcttgctattaagaatagtgaaaaataacaattttaaatttgaatttttttcctacaaatgacagtttcaatttttgtttgtaaaactaaatttttaattttatcatcatgaactagtgtctaaatacctatgtttttttcagaaagcaaggaagtaaactcaaacaaaagtgcgtgtaattaaatactattaatcataggcagatactattttgttatgtttttgtttttttcctgatgaaggcagaagagatggtggtctattaaatatgaattgaatggagggtcctaatgccttatttcaaaacaattcctcagggggaccagctttggcttcatctttctcttgtgtggcttcacatttaaaccagtatctttattgaattagaaaacaagtgggacatattttcctgagagcagcacaggaatcttcttcttggcagctgcagtctgtcaggatgagatatcagattaggttggataggtggggaaatctgaagtgggtacattttttaaattttgctgtgtgggtcacacaaggtctacattacaaaagacagaattcagggatggaaaggagaatgaacaaatgtgggagttcatagttttccttgaatccaacttttaattaccagagtaagttgccaaaatgtgattgttgaagtacaaaaggaactatgaaaaccagaacaaattttaacaaaaggacaaccacagagggatatagtgaatatcgtatcattgtaatcaaagaagtaaggaggtaagattgccacgtgcctgctggtactgtgatgcatttcaagtggcagttttatcacgtttgaatctaccattcatagccagatgtgtatcagatgtttcactgacagtttttaacaataaattcttttcactgtattttatatcacttataataaatcggtgtataattttaaaaaaaaggaattc

SEQ ID NO: 551 - DNA, 2533 bp, Homo sapiens
ggagctcaagctcctctacaaagaggtggacagagaagacagcagagaccatgggacccccctcagcccctccctgcagattgcatgtcccctggaaggaggtcctgctcacagcctcacttctaaccttctggaacccacccaccactgccaagctcactattgaatccacgccattcaatgtcgcagaggggaaggaggttcttctactcgcccacaacctgccccagaatcgtattggttacagctggtacaaaggcgaaagagtggatggcaacagtctaattgtaggatatgtaataggaactcaacaagctaccccagggcccgcatacagtggtcgagagacaatataccccaatgcatccctgctgatccagaacgtcacccagaatgacacaggattctataccctacaagtcataaagtcagatcttgtgaatgaagaagcaaccggacagttccatgtatacccggagctgcccaagccctccatctccagcaacaactccaaccccgtggaggacaaggatgctgtggccttcacctgtgaacctgaggttcagaacacaacctacctgtggtgggtaaatggtcagagcctcccggtcagtcccaggctgcagctgtccaatggcaacatgaccctcactctactcagcgtcaaaaggaacgatgcaggatcctatgaatgtgaaatacagaacccagcgagtgccaaccgcagtgacccagtcaccctgaatgtcctctatggcccagatgtccccaccatttccccctcaaaggccaattaccgtccaggggaaaatctgaacctctcctgccacgcagcctctaacccacctgcacagtactcttggtttatcaatgggacgttccagcaatccacacaagagctctttatccccaacatcactgtgaataatagcggatcctatatgtgccaagcccataactcagccactggcctcaataggaccacagtcacgatgatcacagtctctggaagtgctcctgtcctctcagctgtggccaccgtcggcatcacgattggagtgctggccagggtggctctgatatagcagccctggtgtattttcgatatttcaggaagactggcagattggaccagaccctgaattcttctagctcctccaatcccattttatcccatggaaccactaaaaacaaggtctgctctgctcctgaagccctatatgctggagatggacaactcaatgaaaatttaaagggaaaaccctcaggcctgaggtgtgtgccactcagagacttcacctaactagagacagtcaaactgcaaaccatggtgagaaattgacgacttcacactatggacagcttttcccaagatgtcaaaacaagactcctcatcatgataaggctcttacccccttttaatttgtccttgcttatgcctgcctctttcgcttggcaggatgatgctgtcattagtatttcacaagaagtagcttcagagggtaacttaacagagtgtcagatctatcttgtcaatcccaacgttttacataaaataagagatcctttagtgcacccagtgactgacattagcagcatctttaacacagccgtgtgttcaaatgtacagtggtccttttcagagttggacttctagactcacctgttctcactccctgttttaattcaacccagccatgcaatgccaaataatagaattgctccctaccagctgaacagggaggagtctgtgcagtttctgacacttgttgttgaacatggctaaatacaatgggtatcgctgagactaagttgtagaaattaacaaatgtgctgcttggttaaaatggctacactcatctgactcattctttattctattttagttggtttgtatcttgcctaaggtgcgtagtccaactcttggtattaccctcctaatagtcatactagtagtcatactccctggtgtagtgtattctctaaaagctttaaatgtctgcatgcagccagccatcaaatagtgaatggtctctctttggctggaattacaaaactcagagaaatgtgtcatcaggagaacatcataacccatgaaggataaaagccccaaatggtggtaactgataatagcactaatgctttaagatttggtcacactctcacctaggtgagcgcattgagccagtggtgctaaatgctacatactccaactgaaatgttaaggaagaagatagatccaattaaaaaaaattaaaaccaatttaaaaaaaaaaaagaacacaggagattccagtctacttgagttagcataatacagaagtcccctctactttaacttttacaaaaaagtaacctgaactaatctgatgttaaccaatgtatttatttctgtggttctgtttccttgttccaatttgacaaaacccactgttcttgtattgtattgcccagggggagctatcactgtacttgtagagtggtgctgctttaattcataaatcacaaataaaagccaattagctctataact

SEQ ID NO: 552 - DNA, 10476 bp, Homo sapiens; identical to SEQ ID NO: 98

SEQ ID NO: 553 - DNA, 914 bp, Homo sapiens
ccagccaacgagcggaaaatggcagacaatttttcgctccatgatgcgttatctgggtctggaaacccaaaccctcaaggatggcctggcgcatgggggaaccagcctgctggggcagggggctacccaggggcttcctatcctggggcctaccccgggcaggcacccccaggggcttatcctggacaggcacctccaggcgcctaccatggagcacctggagcttatcccggagcacctgcacctggagtctacccagggccacccagcggccctggggcctacccatcttctggacagccaagtgcccccggagcctaccctgccactggcccctatggcgcccctgctgggccactgattgtgccttataacctgcctttgcctgggggagtggtgcctcgcatgctgataacaattctgggcacggtgaagcccaatgcaaacagaattgctttagatttccaaagagggaatgatgttgccttccactttaacccacgcttcaatgagaacaacaggagagtcattgtttgcaatacaaagctggataataactggggaagggaagaaagacagtcggttttcccatttgaaagtgggaaaccattcaaaatacaagtactggttgaacctgaccacttcaaggttgcagtgaatgatgctcacttgttgcagtacaatcatcgggttaaaaaactcaatgaaatcagcaaactgggaatttctggtgacatagacctcaccagtgcttcatataccatgatataatctgaaaggggcagattaaaaaaaaaaaaaaagaatctaaaccttacatgtgtaaaggtttcatgttcactgtgagtgaaaatttttacattcatcaatatccctcttgtaagtcatctacttaataaatattacagtgaaag

SEQ ID NO: 554 - DNA, 580 bp, Homo sapiens
  misc_feature (1)...(580): n=a,t,g or c
ggcagttgaggcaggagacatcaagagagtatttgtgccctcctcgggttttaccttccagccgagattcttcccctctctacaaccctctctcctcagcgcttcttctttcttggtttgatcctgactgctgtcatggcgtgccctctggagaaggccctggatgtgatggtgtccaccttccacaagtactcgggcaaagagggtgacaagttcaagctcaacaagtcagaactaaaggagctgctgacccgggagctgcccagcttcttggggaaaaggacagatgaagctgctttccagaagctgatgagcaacttggacagcaacagggacaacgaggtggacttccaagagtactgtgtcttcctgtcctgcatcgccatgatgtgtaacgaattctttgaaggcttcccagataagcagcccaggaagaaatgaaaactcctctgatgtggttggggggtctgccagctggggccctccctgtcgccagtgggcacttttttttttccaccctggctccttcagacacgtgcttgatgctgagcaagttcaataaagattcttggaagtttan

SEQ ID NO: 555 - DNA, 2470 bp, Homo sapiens
aatcgcgaaacccggcgagcggcgcgctggctatcgagcgagcggggcggaaccgggagttgcgccgccgctcgggcgccgggctccgtcgcggccgcagccccgcgggtcgccctcccgtgcctcgcccgcggacaccctggccgtggacaccctggccgtgggcacccgcggggcgcggcgcgggcgctgcgcggcggcggcggcggcatgaaggtcacgtcgctcgacggcggccacgtgcgcaagatgctccgcaaggaggcggcggcgcgctgcgtggtgctcgactgccggccctatctggccttcgctgcctcgaacgtgcgcggctcgctcaacgtcaacctcaactcggtggtgctgcggcgggcccggggcggcgcggtgtcggcgcgctacgtgctgcccgacgaggcgcggcgcgcgcggctcctgcaggagggcggcggcggcgtcgcggccgtggtggtgctggaccagggcagccgccactggcagaagctgcgagaggagagcgcgtttgtcgtcctcacctcgctactcgcttgcctacccgccggcccgcgggtctacttcctcaaagggggatatgagactttctactcggaatatcctgagtgttgcgtggatgtaaaacccatttcacaagagaagattgagagtgagagagccctcatcagccagtgtggaaaaccagtggtaaatgtcagctacaggccagcttatgaccagggtggcccagttgaaatccttcccttcctctaccttggaagtgcctaccatgcatccaagtgcgagttcctcgccaacttgcacatcacagccctgctgaatgtctcccgacggacctccgaggcctgcatgacccacctacactacaaatggatccctgtggaagacagccacacggctgacattagctcccactttcaagaagcaatagacttcattgactgtgtcagggaaaagggaggaaaggtcctggtccactgtgaggctgggatctcccgttcacccaccatctgcatggcttaccttatgaagaccaagcagttccgcctgaaggaggccttcgattacatcaagcagaggaggagcatggtctcgcccaactttggcttcatgggccagctcctgcagtacgaatctgagatcctgccctccacgcccaacccccagcctccctcctgccaaggggaggcagcaggctcttcactgataggccatttgcagacactgagccctgacatgcagggtgcctactgcacattccctgcctcggtgctggcaccggtgcctacccactcaacagtctcagagctcagcagaagccctgtggcaacggcccaatcctgctaaaactgggatggaggaatcggcccagccccaagagcaactgtgatttttgtttttaagactcatggacatttcatacctgtgcaatactgaagacctcattctgtcatgctgccccagtgagatagtgagtggtcaccaggcttgcaaatgaacttcagacggacctcagggtaggttctcgggactgaaggaaggccaagccattacgggagcacagcatgtgctgactactgtacttccagacccctgccctcttgggactgcccagtccttgcacctcagagttcgccttttcatttcaagcataagccaataaatacctgcagcaacgtgggagaaagaagttgctggaccaggagaaaaggcagttatgaagccaattcattttgaaggaagcacaatttccaccttattttttgaactttggcagtttcaatgtctgtctctgttgcttcggggcataagctgatcaccgtctagttgggaaagtcaccctacagggtttgtagggacatgatcagcatcctgatttgaaccctgaaatgttgtgtagacaccctcttgggtccaatgaggtagttggttgaagtagcaagatgttggcttttctggattttttttgccatgggttcttcactgaccttggactttggcatgattcttagtcatacttgaacttgtctcattccacctcttctcagagcaactcttcctttgggaaaagagttcttcagatcatagaccaaaaaagtcataccttcgaggtggtagcagtagattccaggaggagaagggtacttgctaggtatcctgggtcagtggcggtgcaaactggtttcctcagctgcctgtccttctgtgtgcttatgtctcttgtgacaattgttttcctccctgcccctggaggttgtcttcaactgtggacttctgggatttgcagattttgcaacgtggtactacttttttttctttttgtctgttagttatttctccaggggaaaaggcaataattttctaagacccgtgtgaatgtgaagaaaagcagtatgttactggttgttgttgttgttcttgttttttatatgtaaaataaaaatagtgaaaggag

SEQ ID NO: 556 - DNA, 577 bp, Homo sapiens; identical to SEQ ID NO: 99

SEQ ID NO: 557 - DNA, 3143 bp, Homo sapiens
ggggaagtgtgggagcaggtgggctgggcagtggcagaaacctgatgacacaatctcgccgcctccctgtgttggtggaggatgtctgcagcagcatttaaattctgggagggcttggttgtcagcagcagcaggaggaggcagagacagcatcgtcgggaccagactcgtctcaggccagttgcagccttctcagccaaacgccgaccaaggtacagcttcagtttgctactgggttgtgcattcagctgaatttcatggggaagtccaaattctaaggaaaaaaatgtggtagtataaaaaggtatcactgttgtaacctatgaagatgtcagctattcctttgaaatattttgcaggaaaactcactaccatgagaattgcagtgatttgcttttgcctcctaggcatcacctgtgccataccagtgagtacagttgcatcttaaagaaaattcctgaaaataactgaattgtgtgcttccatgtgctaggaggacattcttgtaatctttcttcatcttttctgtttctaaggttaaacaggctgattctggaagttctgaggaaaagcaggtaagcatcttttatgtttttatatagttaaatcatttactcaattatggcgagaggtgcaagaaacgtatttgctgcgatcaaatgagttcatatttgtaaagcaatttgaaagagtgcctagcccacagtaagtgctacataagagtttgttaaatgaatctgcaaaaaaaaaaaaaattacaaaaaggtacctaagggtccgggtgactatatgcttccatcaagactagtgaagaatggttgttttttccattcatccctacatttctttttttaataatgataaacatgcaacttttttgtagctttacaacaaatacccagatgctgtggccacatggctaaaccctgacccatctcagaagcagaatctcctagccccacaggtatttttaaacttctcataattaaactacagtgatgaaagatagccacactcaggccatttgggctgctcagatgaatcctgccctgcctgctggcaaacatgtgcttaggacattgactgatctgccatgttggcttctctctgtgttaagccatccacagatgaggctgaaaaataaaaactgctttggattaaaaaggttaacttttgaataaaaaagctaggcatgtgtgatgcgcactaacacgtgccattccttcttcagaatgctgtgtcctctgaagaaaccaatgactttaaacaagaggtaagttctcattttcaatcagaggcccatcatgccttgaagagatgaaagaaggcattgcctggattctcttctgatgaaatttcattagcaagttttccagctaattggcagtctaaaacttgctcataaataaaacatgtatttactaaatatcagaaatactaggtttcctcggataacctaaaagccatggtatgtactgtgaatgcaaagattctgaaactaaataaaaagaaagatagtaaaagactaatgtgctataaaggctaagggaaaataaaaacccatatattaattttcccggccatcttaattttcagacccttccaagtaagtccaacgaaagccatgaccacatggatgatatggatgatgaagatgatgatgaccatgtggacagccaggactccattgactcgaacgactctgatgatgtagatgacactgatgattctcaccagtctgatgagtctcaccattctgatgaatctgatgaactggtcactgattttcccacggacctgccagcaaccgaagttttcactccagttgtccccacagtagacacatatgatggccgaggtgatagtgtggtttatggactgaggtcaaaatctaagaagtttcgcagacctgacatccaggtaaatcctttaacagacacacctgatggttctgactagcgctcaagtctaggaaaccacagtttgcatattcattcattcattcatccattcattcatccattcagcaagaattcattcatattctactttatgaccattgaatacaaatctttttctgcttggcggtttttgtaagtctacataatttctctctagatttgattctcaaacacaattctactttttgaaatcctggatcaaagtaacatgctagtattatttcagccagatttagacaatttttagtataagatgacctaaaagctagagagtggaaaaggattaccatattcccatccctagccgttcatataattattcttcatttgtgccgtgattcagtaccctgatgctacagacgaggacatcacctcacacatggaaagcgaggagttgaatggtgcatacaaggccatccccgttgcccaggacctgaacgcgccttctgattgggacagccgtgggaaggacagttatgaaacgagtcagctggatgaccagagtgctgaaacccacagccacaagcagtccagattatataagcggaaagccaatgatgagagcaatgagcattccgatgtgattgatagtcaggaactttccaaagtcagccgtgaattccacagccatgaatttcacagccatgaagatatgctggttgtagaccccaaaagtaaggaagaagataaacacctgaaatttcgtatttctcatgaattagatagtgcatcttctgaggtcaattaaaaggagaaaaaatacaatttctcactttgcatttagtcaaaagaaaaaatgctttatagcaaaatgaaagagaacatgaaatgcttctttctcagtttattggttgaatgtgtatctatttgagtctggaaataactaatgtgtttgataattagtttagtttgtggcttcatggaaactccctgtaaacaaaagcttcagggttatgtctatgttcattctatagaagaaatgcaaactatcactgtattttaatatttgttattctctcatgaatagaaatttatgtagaagcaaacaaaatacttttacccacttaaaaagagaatataacattttatgtcactataatcttttgttttttaagttagtgtatattttgttgtgattatcttttgtggtgtgaataaatcttttatcttgaatgtaataag

SEQ ID NO: 558 - DNA, 927 bp, Homo sapiens
ggaagtttaggttaactgtcttaaatttccaaagctgtaatcattattttcattctcaaagtgatggccttgtgttttgctcctctcctccagggccagactgagcccaggttgatttcaggcggacaccaatagactccacagcagctccaggagcccagacaccggcggccagaagcaaggctaggagctgctgcagccatgtcggccctcagcctcctcattctgggcctgctcacggcagtgccacctgccagctgtcagcaaggcctggggaaccttcagccctggatgcagggccttatcgcggtggccgtgttcctggtcctcgttgcaatcgcctttgcagtcaaccacttctggtgccaggaggagccggagcctgcacacatgatcctgaccgtcggaaacaaggcagatggagtcctggtgggaacagatggaaggtactcttcgatggcggccagtttcaggtccagtgagcatgagaatgcctatgagaatgtgcccgaggaggaaggcaaggtccgcagcaccccgatgtaaccttctctgtggctccaaccccaagactcccaggcacatgggatggatgtccagtgctaccacccaagccccctccttctttgtgtggaatctgcaatagtgggctgactccctccagccccatgccggccctacccgcccttgaagtatagccagccaaggttggagctcagaccgtgtctaggttggggctcggctgtggccctggggtctcctgctcagctcagaagagccttctggagaggacagtcagctgagcacctcccatcctgctcacacgtccttccccataactatggaaatggccctaatttctgtgaaataaagactttttgtatttctggggctgaggctcagcaacagcccctcaggcttccaaaa

SEQ ID NO: 559 - DNA, 1594 bp, Homo sapiens
gagaggaacatgaactgacgagtaaacatgtatggaaattattctcacttcatgaagtttcccgcaggctatggaggctcccctggccacactggctctacatccatgagcccatcagcagccttgtccacagggaagccaatggacagccaccccagctacacagataccccagtgagtgccccacggactctgagtgcagtggggacccccctcaatgccctgggctctccatatcgagtcatcacctctgccatgggcccaccctcaggagcacttgcagcgcctccaggaatcaacttggttgccccacccagctctcagctaaatgtggtcaacagtgtcagcagttcagaggacatcaagcccttaccagggcttcccgggattggaaacatgaactacccatccaccagccccggatctctggttaaacacatctgtgctatctgtggagacagatcctcaggaaagcactacggggtatacagttgtgaaggctgcaaagggttcttcaagaggacgataaggaaggacctcatctacacgtgtcgggataataaagactgcctcattgacaagcgtcagcgcaaccgctgccagtactgtcgctatcagaagtgccttgtcatgggcatgaagagggaagctgtgcaagaagaaagacagaggagccgagagcgagctgagagtgaggcagaatgtgctaccagtggtcatgaagacatgcctgtggagaggattctagaagctgaacttgctgttgaaccaaagacagaatcctatggtgacatgaatatggagaactcgacaaatgaccctgttaccaacatatgtcatgctgctgacaagcagcttttcaccctcgttgaatgggccaagcgtattccccacttctctgacctcaccttggaggaccaggtcattttgcttcgggcagggtggaatgaattgctgattgcctctttctcccaccgctcagtttccgtgcaggatggcatccttctggccacgggtttacatgtccaccggagcagtgcccacagtgctggggtcggctccatctttgacagagttctaactgagctggtttccaaaatgaaagacatgcagatggacaagtcggaactgggatgcctgcgagccattgtactctttaacccagatgccaagggcctgtccaacccctctgaggtggagactctgcgagagaaggtttatgccacccttgaggcctacaccaagcagaagtatccggaacagccaggcaggtttgccaagctgctgctgcgcctcccagctctgcgttccattggcttgaaatgcctggagcacctcttcttcttcaagctcatcggggacacccccattgacaccttcctcatggagatgttggagaccccgctgcagatcacctgagccccaccagccacagcctccccacccaggatgacccctgggcaggtgtgtgtggacccccaccctgcactttcctccacctcccaccctgacccccttcctgtccccaaaatgtgatgcttataataaagaaaacctttctacaaaaaaaaaaaaaaaaaaaaaaccggaattc

SEQ ID NO: 560 - DNA, 233 bp, Homo sapiens
aacattaggaaaagaagtaaaaaaaaacttgtatggaattcctacgtagtcaattgtctaataggttttgtttatggtacttcagagttgctcaaactatgaaacctaaaatacaacacagtgacttttctcttgagttggcacatctaaatgaacaattcacaaatgtcattaaaaggtactgtttgagaaatacatatttaaaattaaaatgcatcaaaagatatgaaatc

SEQ ID NO: 561 - DNA, 577 bp, Homo sapiens
gagctccgacggcactgacggccatggcgcgttcgaacctcccgctggcgctgggcctggccctggtcgcattctgcctcctggcgctgccacgcgatgcccgggcccggccgcaggagcgcatggtcggagaactccgggacctgtcgcccgacgacccgcaggtgcagaaggcggcgcaggcggccgtggccagctacaacatgggcagcaacagcatctactacttccgagacacgcacatcatcaaggcgcagagccagctggtggccggcatcaagtacttcctgacgatggagatggggagcacagactgccgcaagaccagggtcactggagaccacgtcgacctcaccacttgccccctggcagcaggggcgcagcaggagaagctgcgctgtgactttgaggtccttgtggttccctggcagaactcctctcagctcctaaagcacaactgtgtgcagatgtgataagtccccgagggcgaaggccattgggtttggggccatggtggagggcacttcaggtccgtgggccgtatctgtcacaataaatggccagtgctgcttcttgc

SEQ ID NO: 562 - DNA, 853 bp, Homo sapiens
agtggcaccgctgactgccgagaggaagctcgcctctgcccggctgccctcttgtagtccgccggcgaggggcagttctcggtgaggaggaagagagcagcggacggcacagcacccgcgcgggccctcccacaacagctccagctggcagcatcacttcccgccaatttatccaacttctgccaaggctctgaaatgccaacaacgtcgaggcctgcacttgatgtcaagggtggcacctcacctgcgaaggaggatgccaaccaagagatgagctccgtggcctactccaaccttgcggtgaaagatcgcaaagcagtggccattctgcactaccctggggtagcctcaaatggaaccaaggccagtggggctcccactagttcctcgggatctccaataggctctcctacaaccacccctcccactaaacccccatccttcaacctgcaccccgcccctcacttgctggctagtatgcagctgcagaaacttaatagccagtatcaggggatggctgctgccactccaggccaacccggggaggcaggacccctgcaaaactgggactttggggcccaggcgggaggggcagaatcactctctccttctgctggtgcccagagccctgctatcatcgattcggacccagtggatgaggaagtgctgatgtcgctggtggtggaactggggttggaccgagccaatgagcttccggagctgtggctggggcagaatgagtttgacttcactgcggactttccatctagctgctaatgccaagtgtccctaaagatggaggaataaagccaccaattctgttgtaaataaaaataaagttacttacaaagag

SEQ ID NO: 563 - DNA, 1915 bp, Homo sapiens; identical to SEQ ID NO: 101

SEQ ID NO: 564 - DNA, 8448 bp, Homo sapiens
gcagtggtttctcctccttcctcccaggaagggccaggaaaatggccctggtcctggagatcttcaccctgctggcctccatctgctgggtgtcggccaatatcttcgagtaccaggttgatgcccagccccttcgtccctgtgagctgcagagggaaacggcctttctgaagcaagcagactacgtgccccagtgtgcagaggatggcagcttccagactgtccagtgccagaacgacggccgctcctgctggtgtgtgggtgccaacggcagtgaagtgctgggcagcaggcagccaggacggcctgtggcttgtctgtcattttgtcagctacagaaacagcagatcttactgagtggctacattaacagcacagacacctcctacctccctcagtgtcaggattcaggggactacgcgcctgttcagtgtgatgtgcagcatgtccagtgctggtgtgtggacgcagaggggatggaggtgtatgggacccgccagctggggaggccaaagcgatgtccaaggagctgtgaaataagaaatcgtcgtcttctccacggggtgggagataagtcaccaccccagtgttctgcggagggagagtttatgcctgtccagtgcaaatttgtcaacaccacagacatgatgatttttgatctggtccacagctacaacaggtttccagatgcatttgtgaccttcagttccttccagaggaggttccctgaggtatctgggtattgccactgtgctgacagccaagggcgggaactggctgagacaggtttggagttgttactggatgaaatttatgacaccatttttgctggcctggaccttccttccaccttcactgaaaccaccctgtaccggatactgcagagacggttcctcgcagttcaatcagtcatctctggcagattccgatgccccacaaaatgtgaagtggagcggtttacagcaaccagctttggtcacccctatgttccaagctgccgccgaaatggcgactatcaggcggtgcagtgccagacggaagggccctgctggtgtgtggacgcccaggggaaggaaatgcatggaacccggcagcaaggggagccgccatcttgtgctgaaggccaatcttgtgcctccgaaaggcagcaggccttgtccagactctactttgggacctcaggctacttcagccagcacgacctgttctcttccccagagaaaagatgggcctctccaagagtagccagatttgccacatcctgcccacccacgatcaaggagctctttgtggactctgggcttctccgcccaatggtggagggacagagccaacagttttctgtctcagaaaatcttctcaaagaagccatccgagcaatttttccctcccgagggctggctcgtcttgcccttcagtttaccaccaacccaaagagactccagcaaaacctttttggagggaaatttttggtgaatgttggccagtttaacttgtctggagcccttggcacaagaggcacatttaacttcagtcaatttttccagcaacttggtcttgcaagcttcttgaatggagggagacaagaagatttggccaagccactctctgtgggattagattcaaattcttccacaggaacccctgaagctgctaagaaggatggtactatgaataagccaactgtgggcagctttggctttgaaattaacctacaagagaaccaaaatgccctcaaattccttgcttctctcctggagcttccagaattccttctcttcttgcaacatgctatctctgtgccagaagatgtggcaagagatttaggtgatgtgatggaaacggtactcgactcccagacctgtgagcagacacctgaaaggctatttgtcccatcatgcacgacagaaggaagctatgaggatgtccaatgcttttccggagagtgctggtgtgtgaattcctggggcaaagagcttccaggctcaagagtcagagatggacagccaaggtgccccacagactgtgaaaagcaaagggctcgcatgcaaagcctcatgggcagccagcctgctggctccaccttgtttgtccctgcttgtactagtgagggacatttcctgcctgtccagtgcttcaactcagagtgctactgtgttgatgctgagggtcaggccattcctggaactcgaagtgcaatagggaagcccaagaaatgccccacgccctgtcaattacagtctgagcaagctttcctcaggacggtgcaggccctgctctctaactccagcatgctacccaccctttccgacacctacatcccacagtgcagcaccgatgggcagtggagacaagtgcaatgcaatgggcctcctgagcaggtcttcgagttgtaccaacgatgggaggctcagaacaagggccaggatctgacgcctgccaagctgctagtgaagatcatgagctacagagaagcagcttccggaaacttcagtctctttattcaaagtctgtatgaggctggccagcaagatgtcttcccggtgctgtcacaatacccttctctgcaagatgtcccactagcagcactggaagggaaacggccccagcccagggagaatatcctcctggagccctacctcttctggcagatcttaaatggccaactcagccaatacccggggtcctactcagacttcagcactcctttggcacattttgatcttcggaactgctggtgtgtggatgaggctggccaagaactggaaggaatgcggtctgagccaagcaagctcccaacgtgtcctggctcctgtgaggaagcaaagctccgtgtactgcagttcattagggaaacggaagagattgtttcagcttccaacagttctcggttccctctgggggagagtttcctggtggccaagggaatccggctgaggaatgaggacctcggccttcctccgctcttcccgccccgggaggctttcgcggagtttctgcgtgggagtgattacgccattcgcctggcggctcagtctaccttaagcttctatcagagacgccgcttttccccggacgactcggctggagcatccgcccttctgcggtcgggcccctacatgccacagtgtgatgcgtttggaagttgggagcctgtgcagtgccacgctgggactgggcactgctggtgtgtagatgagaaaggagggttcatccctggctcactgactgcccgctctctgcagattccacagtgcccgacaacctgcgagaaatctcgaaccagtgggctgctttccagttggaaacaggctagatcccaagaaaacccatctccaaaagacctgttcgtcccagcctgcctagaaacaggagaatatgccaggctgcaggcatcgggggctggcacctggtgtgtggaccctgcatcaggagaagagttgcggcctggctcgagcagcagtgcccagtgcccaagcctctgcaatgtgctcaagagtggagtcctctctaggagagtcagcccaggctatgtcccagcctgcagggcagaggatgggggcttttccccagtgcaatgtgaccaggcccagggcagctgctggtgtgtcatggacagcggagaagaggtgcctgggacgcgcgtgaccgggggccagcccgcctgtgagagcccgcggtgtccgctgccattcaacgcgtcggaggtggttggtggaacaatcctgtgtgagacaatctcgggccccacaggctctgccatgcagcagtgccaattgctgtgccgccaaggctcctggagcgtgtttccaccagggccattgatatgtagcctggagagcggacgctgggagtcacagctgcctcagccccgggcctgccaacggccccagctgtggcagaccatccagacccaagggcactttcagctccagctcccgccgggcaagatgtgcagtgctgactacgcgggtttgctgcagactttccaggttttcatattggatgagctgacagcccgcggcttctgccagatccaggtgaagacttttggcaccctggtttccattcctgtctgcaacaactcctctgtgcaggtgggttgtctgaccagggagcgtttaggagtgaatgttacatggaaatcacggcttgaggacatcccagtggcttctcttcctgacttacatgacattgagagagccttggtgggcaaggatctccttgggcgcttcacagatctgatccagagtggctcattccagcttcatctggactccaagacgttcccagcggaaaccatccgcttcctccaaggggaccactttggcacctctcctaggacacggtttgggtgctcggaaggattctaccaagtcttgacaagtgaggccagtcaggacggactgggatgcgttaagtgccatgaaggaagctattcccaagatgaggaatgcattccttgtcctgttggattctaccaagaacaggcagggagcttggcctgtgtcccatgtcctgtgggcagaacgaccatttctgccggagctttcagccagactcactgtgtcactgactgtcagaggaacgaagcaggcctgcaatgtgaccagaatggccagtatcgagccagccagaaggacaggggcagtgggaaggccttctgtgtggacggcgaggggcggaggctgccatggtgggaaacagaggcccctcttgaggactcacagtgtttgatgatgcagaagtttgagaaggttccagaatcaaaggtgatcttcgacgccaatgctcctgtggctgtcagatccaaagttcctgattctgagttccccgtgatgcagtgcttgacagattgcacagaggacgaggcctgcagcttcttcaccgtgtccacgacggagccagagatttcctgtgatttctatgcttggacaagtgacaatgttgcctgcatgacttctgaccagaaacgagatgcactggggaactcaaaggccaccagctttggaagtcttcgctgccaggtgaaagtgaggagccatggtcaagattctccagctgtgtatttgaaaaagggccaaggatccaccacaacacttcagaaacgctttgaacccactggtttccaaaacatgctttctggattgtacaaccccattgtgttctcagcctcaggagccaatctaaccgatgctcacctcttctgtcttcttgcatgcgaccgtgatctgtgttgcgatggcttcgtcctcacacaggttcaaggaggtgccatcatctgtgggttgctgagctcacccagtgtcctgctttgtaatgtcaaagactggatggatccctctgaagcctgggctaatgctacatgtcctggtgtgacatatgaccaggagagccaccaggtgatattgcgtcttggagaccaggagttcatcaagagtctgacacccttagaaggaactcaagacacctttaccaattttcagcaggtttatctctggaaagattctgacatggggtctcggcctgagtctatgggatgtagaaaaaacacagtgccaaggccagcatctccaacagaagcaggtttgacaacagaacttttctcccctgtggacctcaaccaggtcattgtcaatggaaatcaatcactatccagccagaagcactggcttttcaagcacctgttttcagcccagcaggcaaacctatggtgcctttctcgttgtgtgcaggagcactctttctgtcagctcgcagagataacagagagtgcatccttgtacttcacctgcaccctctacccagaggcacaggtgtgtgatgacatcatggagtccaatacccagggctgcagactgatcctgcctcagatgccaaaggccctgttccggaagaaagttatactggaagataaagtgaagaacttttacactcgcctgccgttccaaaaactgatggggatatccattagaaataaagtgcccatgtctgaaaaatctatttctaatgggttctttgaatgtgaacgacggtgcgatgcggacccatgctgcactggctttggatttctaaatgtttcccagttaaaaggaggagaggtgacatgtctcactctgaacagcttgggaattcagatgtgcagtgaggagaatggaggagcctggcgcattttggactgtggctctcctgacattgaagtccacacctatcccttcggatggtaccagaagcccattgctcaaaataatgctcccagtttttgccctttggttgttctgccttccctcacagagaaagtgtctctggaatcgtggcagtccctggccctctcttcagtggttgttgatccatccattaggcactttgatgttgcccatgtcagcactgctgccaccagcaatttctctgctgtccgagacctctgtttgtcggaatgttcccaacatgaggcctgtctcatcaccactctgcaaacccaactcggggctgtgagatgtatgttctatgctgatactcaaagctgcacacatagtctgcagggtcggaactgccgacttctgcttcgtgaagaggccacccacatctaccggaagccaggaatctctctgctcagctatgaggcatctgtaccttctgtgcccatttccacccatggccggctgctgggcaggtcccaggccatccaggtgggtacctcatggaagcaagtggaccagttccttggagttccatatgctgccccgcccctggcagagaggcacttccaggcaccagagcccttgaactggacaggctcctgggatgccagcaagccaagggccagctgctggcagccaggcaccagaacatccacgtctcctggagtcagtgaagattgtttgtatctcaatgtgttcatccctcagaatgtggcccctaacgcgtctgtgctggtgttcttccacaacaccatggacagggaggagagtgaaggatggccggctatcgacggctccttcttggctgctgttggcaacctcatcgtggtcactgccagctaccgagtgggtgtcttcggcttcctgagttctggatccggagaggtgagtggcaactgggggctgctggaccaggtggcggctctgacctgggtgcagacccacatccgaggatttggcggggaccctcggcgcgtgtccctggcagcagaccgtggcggggctgatgtggccagcatccaccttctcacggccagggccaccaactcccaacttttccggagagctgtgctgatgggaggctccgcactctccccggccgccgtcatcagccatgagagggctcagcagcaggcaattgctttggcaaaggaggtcagttgccccatgtcatccagccaagaagtggtgtcctgcctccgccagaagcctgccaatgtcctcaatgatgcccagaccaagctcctggccgtgagtggccctttccactactggggtcctgtgatcgatggccacttcctccgtgagcctccagccagagcactgaagaggtctttatgggtagaggtcgatctgctcattgggagttctcaggacgacgggctcatcaacagagcaaaggctgtgaagcaatttgaggaaagtcgaggccggaccagtagcaaaacagccttttaccaggcactgcagaattctctgggtggcgaggactcagatgcccgcgtcgaggctgctgctacatggtattactctctggagcactccacggatgactatgcctccttctcccgggctctggagaatgccacccgggactactttatcatctgccctataatcgacatggccagtgcctgggcaaagagggcccgaggaaacgtcttcatgtaccatgctcctgaaaactacggccatggcagcctggagctgctggcggatgttcagtttgccttggggcttcccttctacccagcctacgaggggcagttttctctggaggagaagagcctgtcgctgaaaatcatgcagtacttttcccacttcatcagatcaggaaatcccaactacccttatgagttctcacggaaagtacccacatttgcaaccccctggcctgactttgtaccccgtgctggtggagagaactacaaggagttcagtgagctgctccccaatcgacagggcctgaagaaagccgactgctccttctggtccaagtacatctcgtctctgaagacatctgcagatggagccaagggcgggcagtcagcagagagtgaagaggaggagttgacggctggatctgggctaagagaagatctcctaagcctccaggaaccaggctctaagacctacagcaagtgaccagcccttgagctccccaaaaacctcacccgaggctgcccactatggtcatctttttctctaaaatagttacttaccttcaataaagtatctacatgcggtg

SEQ ID NO: 565 - DNA, 607 bp, Homo sapiens
ggactgttgaagacaggtctccacacacagctccagcagccacatttgcaaccttggccatctgtccagaacctgctcccacctcaggcccaggccaaccgtgcactgctgcaatgggctctgagctggagacggcgatggagaccctcatcaacgtgttccacgcccactcgggcaaagagggggacaagtacaagctgagcaagaaggagctgaaagagctgctgcagacggagctctctggcttcctggatgcccagaaggatgtggatgctgtggacaaggtgatgaaggagctagacgagaatggagacggggaggtggacttccaggagtatgtggtgcttgtggctgctctcacagtggcctgtaacaatttcttctgggagaacagttgagcagacagccacattgggcagcgcccttcctctccaccctcccagacctgcctcttccccctgcttccacctcaccccacttatccctctccataaccccacccttgcccaccccacccccacccccaccaagggcgcaagagtagcggtccaagcctgcaactcatctttcattaaaggcttctctctcaccagcaaaaaaaaaaaaa

SEQ ID NO: 566 - DNA, 4244 bp, Homo sapiens
ggcgcagtagcagcgagcagcagagtccgcacgctccggcgaggggcagaagagcgcgagggagcgcggggcagcagaagcgagagccgagcgcggacccagccaggacccacagccctccccagctgcccaggaagagccccagccatggaacaccagctcctgtgctgcgaagtggaaaccatccgccgcgcgtaccccgatgccaacctcctcaacgaccgggtgctgcgggccatgctgaaggcggaggagacctgcgcgccctcggtgtcctacttcaaatgtgtgcagaaggaggtcctgccgtccatgcggaagatcgtcgccacctggatgctggaggtctgcgaggaacagaagtgcgaggaggaggtcttcccgctggccatgaactacctggaccgcttcctgtcgctggagcccgtgaaaaagagccgcctgcagctgctgggggccacttgcatgttcgtggcctctaagatgaaggagaccatccccctgacggccgagaagctgtgcatctacaccgacaactccatccggcccgaggagctgctgcaaatggagctgctcctggtgaacaagctcaagtggaacctggccgcaatgaccccgcacgatttcattgaacacttcctctccaaaatgccagaggcggaggagaacaaacagatcatccgcaaacacgcgcagaccttcgttgccctctgtgccacagatgtgaagttcatttccaatccgccctccatggtggcagcggggagcgtggtggccgcagtgcaaggcctgaacctgaggagccccaacaacttcctgtcctactaccgcctcacacgcttcctctccagagtgatcaagtgtgacccagactgcctccgggcctgccaggagcagatcgaagccctgctggagtcaagcctgcgccaggcccagcagaacatggaccccaaggccgccgaggaggaggaagaggaggaggaggaggtggacctggcttgcacacccaccgacgtgcgggacgtggacatctgagggcgccaggcaggcgggcgccaccgccacccgcagcgagggcggagccggccccaggtgctccactgacagtccctcctctccggagcattttgataccagaagggaaagcttcattctccttgttgttggttgttttttcctttgctctttcccccttccatctctgacttaagcaaaagaaaaagattacccaaaaactgtctttaaaagagagagagagaaaaaaaaaatagtatttgcataaccctgagcggtgggggaggagggttgtgctacagatgatagaggattttataccccaataatcaactcgtttttatattaatgtacttgtttctctgttgtaagaataggcattaacacaaaggaggcgtctcgggagaggattaggttccatcctttacgtgtttaaaaaaaagcataaaaacattttaaaaacatagaaaaattcagcaaaccatttttaaagtagaagagggttttaggtagaaaaacatattcttgtgcttttcctgataaagcacagctgtagtggggttctaggcatctctgtactttgcttgctcatatgcatgtagtcactttataagtcattgtatgttattatattccgtaggtagatgtgtaacctcttcaccttattcatggctgaagtcacctcttggttacagtagcgtagcgtggccgtgtgcatgtcctttgcgcctgtgaccaccaccccaacaaaccatccagtgacaaaccatccagtggaggtttgtcgggcaccagccagcgtagcagggtcgggaaaggccacctgtcccactcctacgatacgctactataaagagaagacgaaatagtgacataatatattctatttttatactcttcctatttttgtagtgacctgtttatgagatgctggttttctacccaacggccctgcagccagctcacgtccaggttcaacccacagctacttggtttgtgttcttcttcatattctaaaaccattccatttccaagcactttcagtccaataggtgtaggaaatagcgctgtttttgttgtgtgtgcagggagggcagttttctaatggaatggtttgggaatatccatgtacttgtttgcaagcaggactttgaggcaagtgtgggccactgtggtggcagtggaggtggggtgtttgggaggctgcgtgccagtcaagaagaaaaaggtttgcattctcacattgccaggatgataagttcctttccttttctttaaagaagttgaagtttaggaatcctttggtgccaactggtgtttgaaagtagggacctcagaggtttacctagagaacaggtggtttttaagggttatcttagatgtttcacaccggaaggtttttaaacactaaaatatataatttatagttaaggctaaaaagtatatttattgcagaggatgttcataaggccagtatgatttataaatgcaatctccccttgatttaaacacacagatacacacacacacacacacacacacacaaaccttctgcctttgatgttacagatttaatacagtttatttttaaagatagatccttttataggtgagaaaaaaacaatctggaagaaaaaaaccacacaaagacattgattcagcctgtttggcgtttcccagagtcatctgattggacaggcatgggtgcaaggaaaattagggtactcaacctaagttcggttccgatgaattcttatcccctgccccttcctttaaaaaacttagtgacaaaatagacaatttgcacatcttggctatgtaattcttgtaatttttatttaggaagtgttgaagggaggtggcaagagtgtggaggctgacgtgtgagggaggacaggcgggaggaggtgtgaggaggaggctcccgaggggaaggggcggtgcccacaccggggacaggccgcagctccattttcttattgcgctgctaccgttgacttccaggcacggtttggaaatattcacatcgcttctgtgtatctctttcacattgtttgctgctattggaggatcagttttttgttttacaatgtcatatactgccatgtactagttttagttttctcttagaacattgtattacagatgccttttttgtagttttttttttttttatgtgatcaattttgacttaatgtgattactgctctattccaaaaaggttgctgtttcacaatacctcatgcttcacttagccatggtggacccagcgggcaggttctgcctgctttggcgggcagacacgcgggcgcgatcccacacaggctggcgggggccggccccgaggccgcgtgcgtgagaaccgcgccggtgtccccagagaccaggctgtgtccctcttctcttccctgcgcctgtgatgctgggcacttcatctgatcgggggcgtagcatcatagtagtttttacagctgtgttatwctttgcgtgtagctatggaagttgcataattattattattattattataacaagtgtgtcttacgtgccaccacggcgttgtacctgtaggactctcattcgggatgattggaatagcttctggaatttgttcaagttttgggtatgtttaatctgttatgtactagtgttctgtttgttattgttttgttaattacaccataatgctaatttaaagagactccaaatctcaatgaagccagctcacagtgctgtgtgccccggtcacctagcaagctgccgaaccaaaagaatttgcaccccgctgcgggcccacgtggttggggccctgccctggcagggtcatcctgtgctcggaggccatctcgggcacaggcccaccccgccccacccctccagaacacggctcacgcttacctcaaccatcctggctgcggcgtctgtctgaaccacgcgggggccttgagggacgctttgtctgtcgtgatggggcaagggcacaagtcctggatgttgtgtgtrtcgagaggccaaaggctggtggcaagtgcacggggcacagcggagtctgtcctgtgacgcgcaagtctgagggtctgggcggcgggcggctgggtctgtgcatttctggttgcaccgcggcgcttcccagcaccaacatgtaaccggcatgtttccagcagaagacaaaaagacaaacatgaaagtctagaaataaaactggtaaaaccccaaaaaaaaaaaaaaaa

SEQ ID NO: 567 - DNA, 3151 bp, Homo sapiens
ccggccagcgggcgggctccccagccaggccgctgcacctgtcaggggaacaagctggaggagcaggaccctagacctctgcagcccataccaggtctcatggaggggaacaagctggaggagcaggactctagccctccacagtccactccagggctcatgaaggggaacaagcgtgaggagcaggggctgggccccgaacctgcggcgccccagcagcccacggcggaggaggaggccctgatcgagttccaccgctcctaccgagagctcttcgagttcttctgcaacaacaccaccatccacggcgccatccgcctggtgtgctcccagcacaaccgcatgaagacggccttctgggcagtgctgtggctctgcacctttggcatgatgtactggcaattcggcctgcttttcggagagtacttcagctaccccgtcagcctcaacatcaacctcaactcggacaagctcgtcttccccgcagtgaccatctgcaccctcaatccctacaggtacccggaaattaaagaggagctggaggagctggaccgcatcacagagcagacgctctttgacctgtacaaatacagctccttcaccactctcgtggccggctcccgcagccgtcgcgacctgcgggggactctgccgcaccccttgcagcgcctgagggtcccgcccccgcctcacggggcccgtcgagcccgtagcgtggcctccagcttgcgggacaacaacccccaggtggactggaaggactggaagatcggcttccagctgtgcaaccagaacaaatcggactgcttctaccagacatactcatcaggggtggatgcggtgagggagtggtaccgcttccactacatcaacatcctgtcgaggctgccagagactctgccatccctggaggaggacacgctgggcaacttcatcttcgcctgccgcttcaaccaggtctcctgcaaccaggcgaattactctcacttccaccacccgatgtatggaaactgctatactttcaatgacaagaacaactccaacctctggatgtcttccatgcctggaatcaacaacggtctgtccctgatgctgcgcgcagagcagaatgacttcattcccctgctgtccacagtgactggggcccgggtaatggtgcacgggcaggatgaacctgcctttatggatgatggtggctttaacttgcggcctggcgtggagacctccatcagcatgaggaaggaaaccctggacagacttgggggcgattatggcgactgcaccaagaatggcagtgatgttcctgttgagaacctttacccttcaaagtacacacagcaggtgtgtattcactcctgcttccaggagagcatgatcaaggagtgtggctgtgcctacatcttctatccgcggccccagaacgtggagtactgtgactacagaaagcacagttcctgggggtactgctactataagctccaggttgacttctcctcagaccacctgggctgtttcaccaagtgccggaagccatgcagcgtgaccagctaccagctctctgctggttactcacgatggccctcggtgacatcccaggaatgggtcttccagatgctatcgcgacagaacaattacaccgtcaacaacaagagaaatggagtggccaaagtcaacatcttcttcaaggagctgaactacaaaaccaattctgagtctccctctgtcacgatggtcaccctcctgtccaacctgggcagccagtggagcctgtggttcggctcctcggtgttgtctgtggtggagatggctgagctcgtctttgacctgctggtcatcatgttcctcatgctgctccgaaggttccgaagccgatactggtctccaggccgagggggcaggggtgctcaggaggtagcctccaccctggcatcctcccctccttcccacttctgcccccaccccatgtctctgtccttgtcccagccaggccctgctccctctccagccttgacagcccctccccctgcctatgccaccctgggcccccgcccatctccagggggctctgcaggggccagttcctccacctgtcctctgggggggccctgagagggaaggagaggtttctcacaccaaggcagatgctcctctggtgggagggtgctggccctggcaagattgaaggatgtgcagggcttcctctcagagccgcccaaactgccgttgatgtgtggaggggaagcaagatgggtaagggctcaggaagttgctccaagaacagtagctgatgaagctgcccagaagtgccttggctccagccctgtaccccttggtactgcctctgaacactctggtttccccacccaactgcggctaagtctctttttcccttggatcagccaagcgaaacttggagctttgacaaggaactttcctaagaaaccgctgataaccaggacaaaacacaaccaagggtacacgcaggcatgcacgggtttcctgcccagcgacggcttaagccagcccccgactggcctggccacactgctctccagtagcacagatgtctgctcctcctcttgaacttgggtgggaaaccccacccaaaagccccctttgttacttaggcaattccccttccctgactcccgagggctagggctagagcagacccgggtaagtaaaggcagacccagggctcctctagcctcatacccgtgccctcacagagccatgccccggcacctctgccctgtgtctttcatacctctacatgtctgcttgagatatttcctcagcctgaaagtttccccaaccatctgccagagaactcctatgcatcccttagaaccctgctcagacaccattacttttgtgaacgcttctgccacatcttgtcttccccaaaattgatcactccgccttctcctgggctcccgtagcacactataacatctgctggagtgttgctgttgcaccatactttcttgtacatttgtgtctcccttcccaactagactgtaagtgccttgcggtcagggactgaatcttgcccgtttatgtatgctccatgtctagcccatcatcctgcttggagcaagtaggcaggagctcaataaatgtttgttgcatgaaaaaaaaaaaaaaaaaa

SEQ ID NO: 568 - DNA, 1130 bp, Homo sapiens; identical to SEQ ID NO: 102

SEQ ID NO: 569 - DNA, 481 bp, Homo sapiens
tctccttgccgggtcagccctgacaaaggtcagctagccccttgaggacatcagctttggcctcagggtcctaatggcagcagaaccactgacagagctagaggagtccattgagaccgtggtcaccaccttcttcacctttgcaaggcaggagggccggaaggatagcctcagcgtcaacgagttcaaagagctggttacccagcagttgccccatctgctcaaggatgtgggctctcttgatgagaagatgaagagcttggatgtgaatcaggactcggagctcaagttcaatgagtactggagattgattggggagctggccaaggaaatcaggaagaagaaagacctgaagatcaggaagaagtaaagccgcctggctgagatggggtgggcagggcagagctgatcagggccgagcagaaccgcactcttcccaaataaagcttcctccttgaaaaaaaaaaaaaaaaaaaaaaaa

SEQ ID NO: 570 - DNA, 1360 bp, Homo sapiens
cgggggttgctccgtccgtgctccgcctcgccatgacttcctacagctatcgccagtcgtcggccacgtcgtccttcggaggcctgggcggcggctccgtgcgttttgggccgggggtcgcttttcgcgcgcccagcattcacgggggctccggcggccgcggcgtatccgtgtcctccgcccgctttgtgtcctcgtcctcctcggggggctacggcggcggctacggcggcgtcctgaccgcgtccgacgggctgctggcgggcaacgagaagctaaccatgcagaacctcaacgaccgcctggcctcctacctggacaaggtgcgcgccctggaggcggccaacggcgagctagaggtgaagatccgcgactggtaccagaagcaggggcctgggccctcccgcgactacagccactactacacgaccatccaggacctgcgggacaagattcttggtgccaccattgagaactccaggattgtcctgcagatcgacaacgcccgtctggctgcagatgacttccgaaccaagtttgagacggaacaggctctgcgcatgagcgtggaggccgacatcaacggcctgcgcagggtgctggatgagctgaccctggccaggaccgacctggagatgcagatcgaaggcctgaaggaagagctggcctacctgaagaagaaccatgaggaggaaatcagtacgctgaggggccaagtgggaggccaggtcagtgtggaggtggattccgctccgggcaccgatctcgccaagatcctgagtgacatgcgaagccaatatgaggtcatggccgagcagaaccggaaggatgctgaagcctggttcaccagccggactgaagaattgaaccgggaggtcgctggccacacggagcagctccagatgagcaggtccgaggttactgacctgcggcgcacccttcagggtcttgagattgagctgcagtcacagctgagcatgaaagctgccttggaagacacactggcagaaacggaggcgcgctttggagcccagctggcgcatatccaggcgctgatcagcggtattgaagcccagctggcggatgtgcgagctgatagtgagcggcagaatcaggagtaccagcggctcatggacatcaagtcgcggctggagcaggagattgccacctaccgcagcctgctcgagggacaggaagatcactacaacaatttgtctgcctccaaggtcctctgaggcagcaggctctggggcttctgctgtcctttggagggtgtcttctgggtagagggatgggaaggaagggacccttacccccggctcttctcctgacctgccaataaaaatttatggtccaaggg

SEQ ID NO: 571 - DNA, 1635 bp, Homo sapiens
aaaggaagagaaagggagagagggagagaagagggagagagcagagagacctcaccgagagagctgcaaaaccagcctggaaaaattagagtattacctaacattagtgaaaaataaaggtactttcttgagaagcccttggacccattctgcctcctggagttctgaacttttcactcactgcctattaattaatgttaagcctgcaaagaatggagttgtcctggatatttggccaaaaaaaaaatgtatccacaaacagggacgtaatcaggcagggagcctcgttaagaagttttgttcttgtcctaggagtgatgagagatcactgaaggatttagagaggggctgtatcatcaggcttgggttccaaagcctcactgagagagttggggagctgactgatgtcagatgctcgtgcagccgccccgtagggcctgtatttcctccatggtgcctcactgcagcaccgagcttgcaaaagatcctctctctttatgggaatttcaaaacagaagcaaaatagcaccggggcttaaagcattcttgggaatttccctgtctttccctctaaataatcagcatgtaaattgcaaaaaaaaaaaaaaaaaaaaaagacacgggcccaaaagggagcgctcagtttcaggctctttgctttccttcctcccgaggctctctggcccttacccagcctgaaaacaaaaagtgtgagggggagggtaggaaggtagttcaagcagggcaatgctgagcctgggaagaaaacaacagccttgtttagggcactgtggcttacgtaactaaattgtgcccagtttccacctggccaggggcctggagtgaatgctgaagatgcaaaggtagaggctgccagaaaagccaggaaattgctggcaagaaaggccagtggtggggtgcaggagtgggaggaaggctgggaaatgcggctgagtcacatctccagaagccccccatcatcaccctagtggctcttctgctggcaggcgcctcatgaagacctgacccaaagttttcaaaactctgcggtttctcaaccctcctctggtaatccatagtactcccccgcctccacttgccagcctcgtgattccttcatggacacatagctcagttcccataaaagggctggtttgccgcgtgggggagtggagtgggacaggtatataaaggaagtacagggcctggggaagaggccctgtctaggtagctggcaccaggagccgtgggcaagggaagaggccacaccctgccctgctctgctgcagccagaatgggtgtgaaggcgtctcaaacaggtatctgggctagccaaggttaatccatcagagttgtgggttttcaggcccagacagcccgcagagccatctgcctgctgggtgagggactaagggagtgggcagagggggaggagaagcagagccaggggagggactgaggctgcaaccaggaggtgggggtgggggagtgggtctcagttgcttgggggagggagcagggcggaagggcaggatgcacttgcaggggtctcatcctggatttctcttcaggctttgtggtcctggtgctgctccagtgctgtgagtaatccctccacctccacttttaagtcca

SEQ ID NO: 572 - DNA, 23822 bp, Homo sapiens
gatctctggggacctgcctggcagtgggtcaaataaataaagggagttggagctcccggagggtaggactaggggttgagtaggagccggcgggctcgggcagggcgggtcccttggggtttccaactccgcgggcggcgcagtgccccgcaggcctcgcttccactggggaattccgggcggggtgcgggcggcggggcgggggcgggccggggcggggccggtaggccgcctataagatgggtggcgcgcccgcccgggccactcgccgcagcctgcgcgccttctccagtccgcggtgccatggcccccgcccgtctgttcgcgctgctgctgttcttcgtaggcggagtcgccgagtcggtgggtgcttggaggttcccgggctgggggcgaagcgggggcgcaggccggtgcctcctttgttcgtcggagcgtgggatgggggggtcagatcgggggtacgctacccccaaccgtacaccgaggcccgggaaactttgttggaaactttgctccggggtcacgggccagctccgggatggcttcacgcgccgtgcgcccctcgcctgttgctcttcccgcctccccgggcctcagccccgccgcgggctacgggctcgttagtgactaagccggtgtcaactcttcaactcccacaccctcgtcccttccctggtgaccctggggcaggcttggagcgctgaatcccctcctcgctctcggggcgcccagagcagacagctttaggatccgagatggccctgggggtcggggggctgcgtgtactcggaagggggagggttttagggttgtgcgaggccctctttcacacaccaaggagaactgagccctaacctcagttctggccccagctctgtcattgacttgtgacttagggcaaaagtcctgcccttctgaatctcttcccaatactgcaccaagggtctgagggaatggggcaagaggggacactgcgttagggtttctagaaagttggggactctgctcttttcgaggacagaggagaggaatggtttagactcaacacttagccaggagctgagcctctgctttctgcaagaagtgtgttcattttttctcaattgcagataagaaaattgaagcatccaccttgagtgaggtgaagggggtaggggggagagaaggcctcaatcagcccagggaaacctttccttctcactgtccactggcctccgtcatagctgtccctgggccagcagaagctctatccatgcccgcagccggcttaggaggaggggggcaatctcatctgggaagttggggggcatgggaattactggtgaaggcaatctgtcccccacagcctgagctttgtgccccctttgtgccctttagccccagttttcagagcgagtgagtccttgcagtttaaccattaatgttaatttctttgaaagccttggggctcctgttcctctgaatttacttagcggaaggttgattctgcctgcaggctcttcttgaggaatgaatgagaccctaggcaatacttccagcacaattccaggcatgccatgatgattgcaaacgtggagcgcctttgtcggggggccagacattgctctaataactttctaatgggtatatcaaggagcttaattccaacaacaatctgactgtgtactgttcttaaactggtcctgaggctagagaggttaagtaacttgcccagggtcacacagttaatacacaataaatgggtgagtcagattgaaatttaggcagccaggctttcaagtttctgctttagcttaacttctactctttgtgctactccaggtgtcccatcgttggtaactaaagacgggtttagaataggttgagattttatgctggaaggcaaaggaattctgaggtggaaggaaacaaggccagagtgaggtgatgacttaacctaaaccaaaggctaccttgcctaaaatgttagtggctgaggacccaagccttctgcctctagcacagtgctctaaactaggccctgaaggatgtgtcgggtcaagcaactggggaagcatccgaaggataccacctaggcagtacagggaaaaagaggaaaggacccaggaggttgctgaggtcaccgtgtgcccagtcacatgccagtttcctccagggctgctgagccttcaggtgcttcagggtgctgagctgtcagctgtgtcctgggggcattctgaaggatgtagtttgggggaaggggactgtgtcagtcctgcctgggtgacccatcagctgcaggagacatcagccctgggcagctgcttcctgagataggtgtcaagtctcatcctgacctcagctctccccttcctggctaatgtcacagacctcctgcctgtaactggggcacagggcttcccctttggcctgtcccctccctcttttctagattgtggttggaaaaatcagacatagtcacggttggctcggactgaagagatgatccagcgtgtccttttctttttgcaggtagagaaaagtgaggcccagggagaaggactttgctaatagcagttaggagtgatagagtactttttatatgacagatctggtgcattttgtcctcacaaaaagacctgtcacatggggattctattatgcccactttccaaatgtgagaggtaaaatggtactactttgggttagtagagggcatccaggaccccaggatctctgactagtagccctcccattgtgggtggtgttcgcccgactgttccatcattccccttaccacccccatattttggaagggaacccaggctcagtacccagctgtcctctcctctgtttggctgggcttgctatactaaaccagttcttcctgtccagctgggagcattccctgatctgccttcctgccactccctctcaggccaattaaaggcagccttgttttgggagtcccctccacccaaaggtgttcctacccaggggcacagcctactgacttggccccaggccaggcggttgtggggaagtgtcccccacctatcacctatcaagtgtactttagcttaaggacatttctggtcttctacagcgtcctcttcttgattacatgggagtaggggtgggggcggaacgtaggggcttctaggacccttgagtgaacagtgagagctcttgggacttcttgagcccagggagttatcaaacaccccagaaaatatttgggccatgatttggagggttccgtgagttggggggaggcctctttccccgctgggctgacatcccccaccttaaaatgaaaggtttgaacagggtagcctccagagtcctttccatctctcaatttgattaataacttaagtacctactattcaaaagaggtctctctcttgaaggaattaacttgagggaattaacatactccaccaaatgctgaatccctccctctctccccccgcacaccgagggcaggaactctgctctatttgtttttgtgaaatacctgtcccctagtttgtactcaggaaatgcttgtatgaatgaataaattcgtgcatgtaactttattctaaatggttcattaatgttatttattgctagtatgagtatctcccagtactgcgaggtaccattttctctatttttacaggaaattgatgctcggaacaatgcagtggcttcctaaggtcagaaccaggtccttctgatagggcaaggtgtctggtttgagtgtcctcagaatattccagatgaggaaatttcgctgggtttgaaggtagataccttaggtcctacttctgcgttgctgggtgaccttgagcaaacatgccctgtctctgggtctcagtgtccccaactctaaaataaggaggctggaccattgccttccaagggtccttcctgcccagagagcccattgatgaggggaggggccctttgctggcctccttggtgaagagtctaaacaaatcccagtctcagaagagaagttggggtggcggggggacattcagctcctgccatccccagctcctagaaacagagggcttttccaaggacttggagtgctgagcctgcctgaatgaggagctggggaagccaggctgggctcccagcccagctccctgttgggagaaattggctcctagctgtccttcaacctcccggactggacaggcgagtgtgatttccaaatgaatgcttaaaattggggtaaggggctggaccgagcgctgtgagtcactgcatgctagcgtagcctgcctgagtcacccatttcctttcaaactcttggctaataggacagctctgtggtggggggtgttggaatgagctcagagttttaccttgtcctttgggagtcactgtttcagtgtccggggcctcgaggggacatacaggacatgtttgtactaggtcccgccactttcacagccccttgcctgcatgtagactttgacattgtacattgtgcagccagtcctcaaaattgggctttagacctctgcagagcaggtagtacttttttcctctttaaggcaaaactgaggctgcaactggcctgcattttttcagagagcaaaagctggtactgttcaggtttggtgtgaccccaggattttctgatgtttgtgaggactcgtctttgcttcctggggctggccagagggcattgaaacattggcttggtgttacacagacttaactccagacgtgcgaagtccacctcttactggctacatgaattcagtcatgctactccacctctgagccccagcctcctggtctgttaagaagatcatgataccggtgtggcgaagcttaaaggagacgacagggctgtaaataaaggcacctagtaccatgcctggtagggaggaggtgttacttagtgacagttcccttccttgcccaggccaccttcatgccagggggtcctatctctgaagattctgagcccaggtctcctggaaagctttctccatcccccttatcccccttatctacccccacagctgggaggtgggaagggagaaatctagggtggggcttttggagtccaaatctcctatttgtttatcttagaagtgggctgtttgctaattatcgaatgggtttatgtttaaacaagaaccagttctgggcagccccacctctcctgctgggatttgctggagcctcatgctgaacagtttgcagcctggagggagagggggcagggggtttgccaagggtatcagaccactctggacactgtccaggacctggggtcaccctcctgtgctggaggggcagagtttctacccttaaggaggctgagtgattgcaaatagcactttgaggggtggggtgttggtggacagaaaaggtacagtgttctgaaaagccagtttctcgtatgttttcactgcatggtgccctagagagggaggagagagaacacatatgtcaacagttggggtctcatttaaccttagaagaataagcctgacttcttgggcttgtttgtcattaactaacacagtggtgaccttgggcacattcttgcatctcactggggcctctctggtcccatctgctgaaggctgggtgactgaaaaagagggtacagaaaactccagcccccgtcctagctctgctgctcacccagggacacacacagttaatacgtcactttgttgatgtgaactccagtgtcctctataaaacacctgtggcactcaaaggtcatcatcgctgtttggcaaacttgtaaagttctggctttattagcacctagacaagggttcttcacccggccagagtttggctttggggaggtggtgtctgtgcatatgttgaaaatgtaaactaagagttacagttattggggtttagacctttttatccttttcagggggctgcagtactccccaaaaggtcactctgatctcagcagttctttctggctttgacctttctacagctatccttcctccctcccccacttcccagccttgttcttgcctcctgcttcccccaacccccaccttcagcccagaccttcctattcagcggcccccaccccttcaggctgcatctcacccctccccctgtcctccaggcccgggagctcggctgctccagttttctctggcacagtagaagaggctgctggtcaggtgacacctggggtaatggaaaggggaggcagggagaggctggtatgtgtggaaacagtgacttggtgaagcccagcagtcagtggccaggcctgcggggactggcggtgtcactctagcctctgggcgtgggggcagatgtggcacatggctggcccggctacccagagtggggatactccttgccttggagaagccctgccggagccgtctgtgggacagactgacctggtctggaggatggcttccttgggggtcggtgagggaggctgggaagaggcaggaagccagcacccagggctgatctaatcagctgagataaggctgcagcgtgggctctctactctgctctgagaacacaggaggtttgtttacatcccgagagcctccctagccctcggatccagcagggatttcggatctgctgcctagattacaagctccaacttcaatgcacctctgtctctgaggccctgagggagccagccccctcctggctgtctccaccggtaatcggagcaatgcccagcttggttactgggctgggacagagggaggcttgtctctttgagacctgtcttttacagattggaaaactgaggctcagagaagggaattgtccacgatcatccagggagttagtaacaagggtgctgggtcagctcctggcagggagacatccagaggctcctgaacccttcccccatttctagctggcaccctaggatcctggagttcttgctgtgggaatgggctgccctgaggcttggtgaaaagctggttgcaggcagtgcaggcctggctctctcctgagtgattgtgttcagagtaacccgaccttgaaggcgacatttgaaccctcactccacccccacccccagacctggtttaaccattcaggcaccagagcaccagaccatggattggtgtgtagtttctttttaccttctagatttttatttatttattttgtccctggggacccaggtccccaagtagaatttcaggtgtttctggtcactgtcatttgcaccttcggggaaaataaaaatggtctttacctctgtctgcttaggacaggtggtcaaagctgtgtgaccttgggcaggtctctgactatctctgtatctttttttcacagtctgaagggacctgattggttgttgaaagtctctgggctcagaagcaaaatgataacctattatagattatattcctttacagtttgcaaagcaccatctccctgtccccaggctagcttccttccagcaacagaactgcctctgcaagttttcccaggcctctgatcctttgagcactgatcccactggccaggaggaaggcaggtaggggttaatcacagccactattcattgatcacgtgctgggtccttgcacacacaaatgcattcctcttaatcctcatcaccctgcaaggtgctaccagccctagtcacaaaagaggaaactgaggatttcagagatgaaataaactcccaagctcatatagttaggaagtggcagaactcacacttgtgaatctgccttgatgcacaaccactctgggtggtagagtcacagttgtgggccccaggttttagccaggctggggaatgtctggcccttaagaagtgggtggggtggggaagaacagttacgagtagtgtacgctgctgggggtctcctgctagaaatcattctggtgggtccaggtgttggagccccaggtactcaccatcccctctccccactaaatttggcttgccagttattacccttctggtcttgcctcctgaaagaagggtcaagtgtgtccccgaccctacctcccctgggagagccaggtcgggagaggctctcattagttcacagttatccaagccctgaccctgaactcctctctggtgccccagccaagtttctgttcctttgtttaagtgatatcactttcacctttgtttactcctaggcagggacagggttgccctggagccctggcccagccagtgtgttgtggactggcgggttaggctggagagaagtgaagagtgggtggcagtgagaagcctagttgtggttgggacgtgttcttgaggaagatctggatttgaatcccagctctagctttctagttgcatgacgttggataagtgactcagctgaacctcagtcttctcatctgcaaaatgggtagagcaccttgcaaggctgttttgccatttaaatgaacttgtataaacaaagtacccagcatggtgcttggcatgtagtggatactccttttagtcactcatgcttttcctggggtgatagaagccataggatttggggatagggttgggataggaccttttcgtagcttcatgcctatagccaaaagactagatggggagtataactgtaatgacagctgctgcctgtggatttgctgagacccttaggggcagccaacaccctggaaggcgagagaagataattccagtctggagccaggatacctaggttctaagtccatctccgctgccagctgcttggatgaccttggcaaaatcccttgtcttgtctgtttgctaggttataaaatcagataccttctgttggcaggtgttagtttctgtagaacaaaagagcacttcccctcccttctttctccccaacagtctggggaagaatgtagtatctctaaacccccaggcactaatcccagatccccaccagccacagggccagcagagtctgtgggacctaggcccattgccctattttttattttttggagacagggtcttcctctgtcacccaggctggagtgcagtggcacgatcgtagctcactgcaacctcgacctcctgggctcaagtgatcctcccacttcagcctcccgagtagctgggaccacaggcgtgcacaaccacatttggctaatttttgtagagatggggtttcaccatgttgcccaggctgatctcaaactcttgggctcaagtgagcctcccaccttggcctcccaaaatgttgggattaagccactgtgcctagccaccactgtcttacttagttggtaatttctgttgtgtgttcatgaaagggacaaagatacaaggagacttgagagcccagagagggtgcctgtgcatgtatacacactaacacacatgccttgggcaaaggtgggtgagctgaggagaacagaccacattcttagccaggagcagggcgggtccatctctggtcagggctgggcctggctgctgggtggcctggttcttcaaagtcaccccagactcaatgggctttatctgaaaagagggcggaggagaggaggaccgttggtgccttcccaacctttacacaaaaaagagtgattgcccacaatcccacggggcttggtcccgtcttgctggcctagtcctaaatggctcttatccactttggagttgccttccctcttgtcagaggtcatgggtggagaagggaccaaaacagggcagagagggggcttccagagctcaaggagagatttaattccctgtgtcctcctatcaccactgggagctggaagaagtttctttccagccccttgacttgctgtaggagggaaatcctgggctcatctaaatgcagcctttgaagactccatcttttcagagctttgaaataggatcgaatccaggccgtgccgcggagccccggggtgacttcagactagactagtttcttttttggaaactgagtataaaaatgaagggttaaggatgaacaggtgcccacaaagagggctgaactgggaataaatcttggtttcagccttggttttgctgctgacttggctgcaagatcttcacgccccactttcgctcatagccttcatttctctaatgtaaaacggaggtaattcctaacagccagtgggcatgctaatcccatgggttgttttgaaatacctcttagcactttcacatactgaaagagaggctggatgcataaacaaccttccatggctcctgggggcagtgaggggtgggaaaaggtctctcagcctgagacaagtctcctgatggaactacagcccctgttgaggactttgacctggtcaacagctggccaaagtgtaccattctttctttctcccggctagattgacccccctacttaacagggctcccttggagctggggcaggctggtgaccccgtgtacatatgtgttcatgcgtgtgtttatgtgtttgtggttaaatgtccaggtcagtgaagcctgggttctggcccagtgtggctacttcctgcttgtgtggccttggacaagtgactttacttttctgagcccttgtttccatctctgcaaaaagggactattaaaaggacctagacaggctgtgtgcttggttaaggcctgtcacttgggttcttgggggatttgccacaggagatggaggtaggagcacagggaccctgcccttaggtataggcacttgggcagccatgaggagccttcctcctgctctgccaaaccaaagccacaggcacgggctatgtgcgggggcttgaattccagcaccagcagcccggcagctcctgattcccgagtcatgaagtcatctctgagcagcacttaacctctctggctttccacccccacgggtgccaagcgttcagcattctccccactccccgggagagagtgattcctggccactgccttccttgtggcctgaccccgctcccttccgggaatccagcattctccctctgtgggggtggaagagggtgcatgagggtcaggttccacctgcctctccccagaagcccagtggggagagtacaggagtggctctgaagcagctttcctgggcctctcctgcaatgataataaccttatcttagggacagatgttccttctcagacaccctcctttgtcaatggcagtctcagctgagtgaaggactgcctggggtgtccgaaacagagacctgacctctttctatcctgagttatgtagcgaacgctctgtgtgaccttgggcaagtccctcccctgttccgggctcagattcaagttgtgtgaaacgggaggacaggagctccttgggtcctggcattctgtgattctaagcagacccccagctcctgcagttatggcgtctggagaagatgggaatgtctttcagcgggaggggcatggtgtattgaacttaatgaaaaaccccaactctcctggcaaatactaggcactttagtgtttgaattaattagtagaataatgaactttgctcagagctgctgttctctgggcaaacagaagcctgagcccagaagctggaggaagggtgatgggcatccaaatgtttcctgtgctcttgagggtacattgttcccactcggtggagctacaggatgggagcagggtaactgatgtactgtagggctgcccgggacctttgacactttcttttggcaagcggtttggtgggagtggacctgagactctgtcctgatcagctgtgtctccacagggtagtggctgagtgatgattatgggtactggagtggatggtctgtgagggtagggattgtgcctctcggtgtctgcatggtgctggcagcagagtagatctgtgggagatgtttggaaggcaagactgaatccaggagtacactcctgagtcatcaggtctgggcagcgccctgacctgaggctgtcttagggtgtgcgtgaggcagccctgtctgtcccggcccagactgactcagctgggaaaagtatcctggactgggcaagaccagaaccaggagcccactccctgtcctgtgtgaatcagctgccactgcatcacagagccctggagtgtagcatcccagggccctgtgcatggagactcctggctctgaagtcaggcagccctgcgtatgcaatcctcgctcttccatctgccagctgtgtcaccaaaagaaaatgactccctcggctgtaaaaagaagtgaataacatgcctccagagttattaaaacagggcccagcacatagcaagtgctcggtaaaggatatctagccatattaataatttgattattacctcatttactgtttttattttttttgagacgggggtcccactctgtagctcaggctagagtgcaacggcgtgatcctggcttattgcaacctccgcctcccgggttcaagcaattctcctgtctcagcctcccgagtagctgggactacaggcgtaagccaccacgcccagctgatttttgtatttttagtagagacggggtttcaccatgttggcctggcaggtcttgaactcctgacctcaagtgatctgcctgcctccgcctcccaaagtgttgggattacaggtgtgagccactgtgcccagcctcatgtactatttttatttgcccagaatggaaagagacttgcctaaggacacgcggtgagttagaggtagagtgggatccaggacgcaggtctccaggccctggctgtctctttctagtttctgaatgcccacttcactagcttttgggcatcagctgtcatggagcactggggatgttggctgatgtgtctcctttctttatcttagatccgagagactgaggtcatcgacccccaggacctcctagaaggccgatacttctccggagccctaccagacgatgaggatgtagtggggcccgggcaggaatctgatgactttgagctgtctggctctggagatctgggtacggaaggtgtgctgggcaggcgtaggcacaaagctggagggagtggtggcttcaccagccaggagggtgaccatgccttgagacttggatttttgtgggacttttcctagagtgcccttcttcttccttctcaaaaaaaggggaaacaaaagtaatggattaacctattccatcccctgagagcccctggggacaagctgtttgctgctttgaagtcattggtagctctgggttttctgagctccagcctgaacgtgtcctcataagctcttctcttttctgcagggcatggtgggggtggggtgagggtaggatgggtggcaggacagggtgggagtggggaaggaggacccatagagtgttttcctttttttgaaaggaaaagttccaccctgggccacatggtgagaacttgtctctacaaaaacacaaaaattagctggatgtggtggcatgcacctgtaggagtcccagctacttgggaggctgaggtgggacgatcccttgagcctaggaggttggggctgcagtgagccaagatcatgctactgcactccagcctgggtgacagagtgagaccctgtctcaaaacaaaaaaggaaaagtagcagcttagaagtggggatggggtgggagggggcatgagtgggcagagatgtagttgggaaaccaagaacaagtccctgcttcagtgggggtgggggcgggtgaagggcccaaggctctaggccagacagctaataagtgtccctcctatgtgcagagaggtgttaatgattgcaagttttagctttgcaagttttagctttggagtcacatggtcctgagttcaagcctccatcctgtgtgaactgagcttcagttttctaatctgtaaaatgggaataataaagatagtacatcagtgttgtggggactgaactgacttaaagcttttggcacctaccaagcactcagtacgtgtgtgtttggtttaaaaaaaaaataaattttatggccgggcacggtgctcatgccgtgaatcccagcactttgggaggccaaggcaggaggatcacgaggtcaggagtttgagaccagcctggccaacatggtgaaaccccgtctctactaaaaatacaaaaattagccaggtgtggtgtcgagtgcctgtaatcccagctacttgggaggctgaggcaggagaattgcttgaacccgggaggcagaggttgcagtgagctgagatcacgccattgcactccagcctggtgacagagcaagactctgtcttgaaaaaaaataaaaataaaaaaataaatttcattatgtgcatacaacatgatattatgggatacatatagatagtaaaaatgttactacagtggagttaagtaatatatccatcatctcacatagtcgcccaggaaatgttttaatattgcagttagagttttctttctcaaaagttaattccctggggatcttgttaaaatgtagattttggccgggcgcggtggcttacacctgtaattgaagcactgtgggaggccaaggcaggcggatcacaaggtcaagagatcgagaccatcctggccaaccaacatggtgaaaccccgtctctactaaaaatacaaaaatcagctgggtgtcatggtgccaccctgtagtcccagctactcggggggctgaggcaggagaatcgcttgaacccaggaggcagaggttgcagtgagccgagatggcaccacggtactccagcccaggcgacagagagagactctgtctcaaaaaaaaaaaagtagattttgattcagtcagccctgaaattctacatttcttcttcttttttttttaaccaatgaattatttttactctttttaaataagtgaaatattagctttaatgttttctgatcatgacaatatttttagataagaacattttaaacattcaacagtaagagactattgaaaataaatgaaattcattgaatagaagtaattaaaataataatgtaactctttaagcattgtaatggaaagatgttaatgatatattgttacgagcccattattgggaaaaatgtatttaggaatacgtatggagggaatttatttatttatttttttgagacggagtcttgttctgtcgcccaggctggagtgcggtggtaccatcttggcccactgcaacctctgccaaccgggttcaaagtgattctcctgcctcagcctcccaagtagctgggattacaggcgcgtgccatcacccgtggataatttttgtattttcagcagagacggggtttcactatgttggccaggctggtctcgatctcctgacctcaagtgatctgcccgccttggcctcccaaaatgctgggattacaggcgtgagccaccgcgcctggccttgaaattctacatttctaaccagctctcaggtgttgctattggtttttggatccacactttgcagagcaagggtttagagcagatgaagcctctgcccagctgccagctcacacattcctgtgaaagagccagggggtgggtctgaggagccccattttacagatgagatgactgaagtaggggtggggaagctcgcttgctggacattgagcatttggaagctggttgtaaggtggagctcccaccagtcctggctgaaggggtcattttcctggggtaatggacctcactcacacagctattctgaccttacagatgacttggaagactccatgatcggccctgaagttgtccatcccttggtaagtagctacatgcttctgcctcttccactttgctcctctatagcagacctattgggagaggcagaaaatacagcccccataggcagaataagtgaggggtcttaccccactatgcgggaaggctttttaaaaatctggccctggggtgggcatggtggctcaggcctgtaatcccagcactttgggaggcttgaggtcaggagttcaagaccagcctgggcaacacgatgaaacctgtctctacataaaatacaaaaattagccaggtgtggtggcatgtgcctgtagtcccagctacttgagaggctgaggtgggagaatggcttaagtccaggaggcagaggttgcagtgagccaagattgtgccagtgcactccagcctgggtgacagagccagactgtgttaaaacaaacaaacaaacaaacaaatctggccccaggctcattttgtaggttgctggtaggccatcctccctgcagggatagtcaccgtcaacaccaactccttttctctacatttatagctatttcctagcattgatagaaaagtatatatataggccgggcacagtggctaatgcctgtaatcccagcactttgggaggctaagacgggcagatcacctgaggtcaggagttcgagaccagcctggccaacatggtgaaaccctatctctactaaaaatacaaaaaattagcctggcacggtggcgtgcgcctgtagtcccagctacttgattgggaggctgaggtaggaggatcgcttgaacctgagaggcagagattgcagtgggcagagattgcaccattgcaccccagcctgggcgacagagactccctctcaaaaaaaaaaaaaaaaagtatatatatataattctatgaactgcgtttttcacttagactggtcatgagtatttccctgcataatttaatgctcttgtcatttttataggctgcgtaatagtttacctgattccctttattgacggaaaaatggcttataatttgttaacattttaaaattataacactgcagcaaacatcttttttatttttgcaaagcaataacaagtttattaagaaagtaaaggaataaaagaatggctactccataggtagagcagtggcattggctgctggttgcccatttttatggttatttcttgattatatgttaagcaaggggtagattattcatgagttttccaacaaaggggtgggcaattcccagaactaggggctcctcccctttttagaccatatagagtaacttcctgactttgccagggcatttgtaaattgccatggcactgatgggagtgtctcttagcatgctaatgtagtataattagcatataatgagcagtgagaccaacagtttcattgccatcctgtttttggtggtttttggcaagcttctttattgcaacctgttttatcagcaaggtctttatgacctgtatcttgtgcagacctcctatctcattctgttacgtaggatgcttaacttactgggaatgcggcccagcaggtctcagccttattttacccagcccctattcaagatgtaggcactctggttcaaacacctgacattttccccctcccttttgtaagaaaacccttaatcctaagggttgcagagggacaaagatccatcttctataacttcttcatgctgaatagggtgatgatattcctgcttaactattagggcctcttgtatccatggtagagaggggttcagtcagaaagggccagtatggtgagggccattcataactcttagttctgacaaaaggtgatatccaaagtcctccaatcagtgctgcagtccatttcctttgattcgggagtctcctccgtctcatcccttctgtggttctccagaaagatgttaccagaaaggggtcccgatccagaccccaagggagagggttcttggatcttgcacaaggtagaattcagggtgagtccatagagtaaagtgaaagcaagtttattaagacagtaaaggaataaaagaatggctacttcataggcagaggagctgcagcaagcatcttttacacgtagtctctgaagagctccttacaatagagtttccagggcaaaactgccaccttaaagggcaagcgatgtctaaggttttgccaaattgcttccagagtggttgctctagaataaccagtggccagcagtgcaggagagcacctgcttccctgttcccttgggtgcattcatttttcatttgggacagatatactaaaaaagttggggataaggattttggcagcataattgtggagacagtgttgccaattcctgctccaggaccatatggttcagctgaatatggcagaaccagattctctgcctggctgaatgtccctgtcccctgccctgagtctcttccaaaatacgctgagtgtctcttctcctttccgcccatccaggtgcctctagataaccatatccctgagagggcagggtctgggagccaagtccccaccgaacccaagaaactagaggagaatgaggttatccccaagagaatctcacccgttgaagagagtgaggatgtgtccaacaaggtgtcaatgtccagcactgtgcagggcagcaacatctttgagagaacggaggtcctggcaggtaagtcccatgctgcttataagatgccttgaaggtggaatggggctcagcgggggagagcacctgcaggcagggatgcctccagccatgaggctccttggtgccccttccttttgcctattcaggttgccctagaacattgaaagactacaccttccttatggggtggctctgactgtgcagcctggtggagggagaggaaaaagcacctatcaaagtcttctggaaaataggcaattgagtcattcttctgccttaagtctttctcatttattttgcaaaggactttcactgtataagtttggcatctgggagttaatcattaaaagttaatttcccttgtaagtctggaggctccttcgaattgggttagcttcccctccccctactctatcacttggcagccttgtgaccttggctgagaagctttcgaacttgatgagcctcagtttccttatctgtaaaatgggtacagtgataccttctggggttgatataatgagtccatgaaaaataaaatatgaaataactttgcacactataaagggctattccgatttggcctcagttcagagttctttactggaatgtgcggtgaggaatgctttgtcccaggtgttgacaaaagggatggagggaactccccaaggtcatggccgagggcagcctggatgaaccggcctggcaagtgggcaccctgggcccatgctgggtaactcctgtctcctgggaatcaacagagccagcagctccaaggaggcttgagctatagggacagagcctggcttcatccaggacagatggaaggtctcacctgcctcttgtaaagagggttcctgggagcacagcccctgatgactgggcccacctcagccctgaccctggcttcctggtatctgagccaaagttctttttacttttctttcagaagtaaaaagatttgcataagactttggatttgcataaggttttgctctaattaactaaaggtgctattgcttctaaagaaaaatttgaaaaccactgattaatctaagcacctgcttcttatacatggggagactgaggcccaggctttaggccacatagtaagaaaagaactgaagccaggttatctctttaatcttccatttgagaattatacaagcctaagagcctcatgtgaaaagttatattgttagctggtgtggtggaatcccccattccagaagctttaatcagcacccaggagccttattaaatgcttgctgtatgctgtatgattcctgtgcccctgattgagtccgtacaacacaaaactcagtctaaagaacttatccgaagtcacaaagctggaagtggcagacctggcatttggactgaggaccacagtcagcttctgagaatgtgcttgaaacttgaccctgtggggcatcccagcgcagacccagggcctcgtggaggaactggggtcatcagagggaaaggtgatagagacaagaatggggttgatgcctgatattccatgtgcttgctctggcacctcctgggggtacttttttgttgctttttcataggattttacccaagaaagaaccttgcttgactcctctgtgccactctgtccccattgtgtacatagatttgtagtgtgtgcagggatggaaaattaatcttcttagcccgagtaagaccgaattagggaactcaatctgccacagaagggattctatgaagcatccctgcccctagcaaacaggaatgagtcattcaggccacctggcagagtggacaggccagacccactcactgttagaagcccatctctgcccaacactaggcaggttctcctctcggagcctgaaagtatcatttattaagcacctcctgttgtgcacacctgattcagggggttcgggacacagatataaaccttaaacccttacagttaatgaatcttgagaatatgctatgcactaggcattgttctaagcactttgagtggattaatttatttaatccttaggacaaatgtatgagaaaggtatggctcttcccattttgcggtagggagatgaaggaaacttgccccaaatcacacagccaggaagtaggagaggtaggagtggaaaccaggccttagctactgagttctgtatgtaattgtaacataagagtttggaattagtatgttctgcatgtgtgcactttgaatgtacatacctgtctatgaagtgtaggctatataggtaaatatgcacacagggagagctagagagtgccctgtgctaaggactgcaggataaatatgtctacagggatttccatagcctacggttttctcctgttcctggttcagttagtgctagactgttgcaggggagtccgcgtggtgtttggaaagagcctaggctttagattcaggcagatgtgggttaaaatagtggccttggccgagtgcggtggctcacgcctgtaatcccagcactttgggaggccgagatgggcaaggtcaggagttcaagaccagcctggccaacatagtgaaaccctatctctactaaaaatacaaaaattagccgggcatggtggcacgtgcctataatcccagctactcaggaggctgaggcaggagaattgcttgaacctgggaggtggaggttgcagtaagccgagatcacgccactgcactcagctcgggcaacagagtgagacttcgtctcaaaaagaaaaaggagtggccttaccactagccctgtggtcttcagtgacttaaaatgccaacgacccacttcttataactggggtcatgaggtcaacttaaataaggcatcagcttgcctggcacaggcagtggtgatggtgaggatgtctggttgtaagagaactgacagtgggggaaagaggggttcatccttaggtcctgatgaggagctctgacccccgcctcttctctctcctcctctccagctctgattgtgggtggcatcgtgggcatcctctttgccgtcttcctgatcctactgctcatgtaccgtatgaagaagaaggatgaaggcagctatgacctgggcaagaaacccatctacaagaaagcccccaccaatgagttctacgcgtgaagcttgcttgtgggcactggcttggactttagcggggagggaagccaggggattttgaagggtggacattagggtagggtgaggtcaacctaatactgacttgtcagtatctccagctctgattacctttgaagtgttcagaagagacattgtcttctactgttctgccaggttcttcttgagctttgggcctcagttgccctggcagaaaaatggattcaacttggcctttctgaaggcaagactgggattggatcacttcttaaacttccagttaagaatctaggtccgccctcaagcccatactgaccatgcctcatccagagctcctctgaagccagggggctaacggatgttgtgtggagtcctggctggaggtcctcccccagtggccttcctcccttcctttcacagccggtctctctgccaggaaatgggggaaggaactagaaccacctgcaccttgagatgtttctgtaaatgggtacttgtgatcacactacgggaatctctgtggtatatacctggggccattctaggctctttcaagtgacttttggaaatcaaccttttttatttgggggggaggatggggaaaagagctgagagtttatgctgaaatggatttatagaatatttgtaaatctatttttagtgtttgttcgtttttttaactgttcattcctttgtgcagagtgtatatctctgcctgggcaagagtgtggaggtgccgaggtgtcttcattctctcgcacatttccacagcacctgctaagtttgtatttaatggtttttgtttttgtttttgtttgtttcttgaaaatgagagaagagccggagagatgatttttattaattttttttttttttttttttttttactatttatagctttagatagggcctcccttcccctcttctttctttgttctctttcattaaaccccttccccagtttttttttatactttaaaccccgctcctcatggccttggccctttctgaagctgcttcctcttataaaatagcttttgccgaaacatagtttttttttagcagatcccaaaatataatgaaggggatggtgggatatttgtgtctgtgttcttataatatattattattcttccttggttctagaaaaatagataaatatatttttttcaggaaatagtgtggtgtttccagtttgatgttgctgggtggttgagtgagtgaattttcatgtggctgggtgggtttttgcctttttctcttgccctgttcctggtgccttctgatggggctggaatagttgaggtggatggttctaccctttctgccttctgtttgggacccagctggtgttctttggtttgctttcttcaggctctagggctgtgctatccaatacagtaaccacatgcggctgtttaaagttaagccaattaaaatcacataagattaaaaattccttcctcagttgcactaaccacgtttctagaggcgtcactgtatgtagttcatggctactgtactgacagcgagagcatgtccatctgttggacagcactattctagagaactaaactggcttaacgagtcacagcctcagctgtgctgggacgacccttgtctccctgggtaggaggggggggaatgggggagggctgatgaggccccagctggggcctgttgtctgggaccctccctctcctgagaggggaggcctggtggcttagcctgggcaggtcgtgtctcctcctgaccccagtggctgcggtgaggggaaccaccctcccttgctgcaccagtggccattagctcccgtcaccactgcaacccagggtcccagctggctgggtcctcttctgcccccagtgcccttccccttgggctgtgttggagtgagcacctcctctgtaggcacctctcacactgttgtctgttactgattttttttgataaaaagataataaaacctggtactttctaaactgcttgcctctgtcattttcgttcataacaagtcatcctttttgggctctgtatccccttgatctcagtggagcatgaagaaactccccggaccaaatcccctacgggtgccagacatgccgggggtgggcagagggtgggggcagagaggtaagaaggcaggaaggggcctagagaagagggaagacttcagaacatgcaccctgatggcctatgcagcatatcacccctacttcaaggttttgtttaggtggcactgtgtttaaatagcaaacacaaaaatctttgcgtcagttgccatccatagaaatcaggaggtttcacataaaaatccagatttctcacttttcttgggaaaaagaaataaaaaaaattggcaactgtcagcctgcatggcaacaagagagctgctgagtggcaggcacccatctaga

SEQ ID NO: 573 - DNA, 1804 bp, Homo sapiens
cgctccacctctcaagcagccagcgcctgcctgaatctgttctgccccctccccacccatttcaccaccaccatgacaccgggcacccagtctcctttcttcctgctgctgctcctcacagtgcttacagttgttacaggttctggtcatgcaagctctaccccaggtggagaaaaggagacttcggctacccagagaagttcagtgcccagctctactgagaagaatgctgtgagtatgaccagcagcgtactctccagccacagccccggttcaggctcctccaccactcagggacaggatgtcactctggccccggccacggaaccagcttcaggttcagctgccacctggggacaggatgtcacctcggtcccagtcaccaggccagccctgggctccaccaccccgccagcccacgatgtcacctcagccccggacaacaagccagccccgggctccaccgcccccccagcccacggtgtcacctcggccccggacaccaggccggccccgggctccaccgcccccccagcccatggtgtcacctcggccccggacaacaggcccgccttgggctccaccgcccctccagtccacaatgtcacctcggcctcaggctctgcatcaggctcagcttctactctggtgcacaacggcacctctgccagggctaccacaaccccagccagcaagagcactccattctcaattcccagccaccactctgatactcctaccacccttgccagccatagcaccaagactgatgccagtagcactcaccatagcacggtacctcctctcacctcctccaatcacagcacttctccccagttgtctactggggtctctttctttttcctgtcttttcacatttcaaacctccagtttaattcctctctggaagatcccagcaccgactactaccaagagctgcagagagacatttctgaaatgtttttgcagatttataaacaagggggttttctgggcctctccaatattaagttcaggccaggatctgtggtggtacaattgactctggccttccgagaaggtaccatcaatgtccacgacgtggagacacagttcaatcagtataaaacggaagcagcctctcgatataacctgacgatctcagacgtcagcgtgagtgatgtgccatttcctttctctgcccagtctggggctggggtgccaggctggggcatcgcgctgctggtgctggtctgtgttctggttgcgctggccattgtctatctcattgccttggctgtctgtcagtgccgccgaaagaactacgggcagctggacatctttccagcccgggatacctaccatcctatgagcgagtaccccacctaccacacccatgggcgctatgtgccccctagcagtaccgatcgtagcccctatgagaaggtttctgcaggtaatggtggcagcagcctctcttacacaaacccagcagtggcagccacttctgccaacttgtaggggcacgtcgcccgctgagctgagtggccagccagtgccattccactccactcaggttcttcagggccagagcccctgcaccctgtttgggctggtgagctgggagttcaggtgggctgctcacaccgtccttcagaggccccaccaatttctcggacacttctcagtgtgtggaagctcatgtgggcccctgaggctcatgcctgggaagtgttgtggtgggggctcccaggaggactggcccagagagccctgagatagcggggatcctgaactggactgaataaaacgtggtctcccactg

SEQ ID NO: 574 - DNA, 7680 bp, Homo sapiens
gaagagcaagaggcaggctcagcaaatggttcagccccagtccccggtggctgtcagtcaaagcaagcccggttgttatgacaatggaaaacactatcagataaatcaacagtgggagcggacctacctaggtaatgtgttggtttgtacttgttatggaggaagccgaggttttaactgcgaaagtaaacctgaagctgaagagacttgctttgacaagtacactgggaacacttaccgagtgggtgacacttatgagcgtcctaaagactccatgatctgggactgtacctgcatcggggctgggcgagggagaataagctgtaccatcgcaaaccgctgccatgaagggggtcagtcctacaagattggtgacacctggaggagaccacatgagactggtggttacatgttagagtgtgtgtgtcttggtaatggaaaaggagaatggacctgcaagcccatagctgagaagtgttttgatcatgctgctgggacttcctatgtggtcggagaaacgtgggagaagccctaccaaggctggatgatggtagattgtacttgcctgggagaaggcagcggacgcatcacttgcacttctagaaatagatgcaacgatcaggacacaaggacatcctatagaattggagacacctggagcaagaaggataatcgaggaaacctgctccagtgcatctgcacaggcaacggccgaggagagtggaagtgtgagaggcacacctctgtgcagaccacatcgagcggatctggccccttcaccgatgttcgtgcagctgtttaccaaccgcagcctcacccccagcctcctccctatggccactgtgtcacagacagtggtgtggtctactctgtggggatgcagtggttgaagacacaaggaaataagcaaatgctttgcacgtgcctgggcaacggagtcagctgccaagagacagctgtaacccagacttacggtggcaacttaaatggagagccatgtgtcttaccattcacctacaatggcaggacgttctactcctgcaccacggaagggcgacaggacggacatctttggtgcagcacaacttcgaattatgagcaggaccagaaatactctttctgcacagaccacactgttttggttcagactcaaggaggaaattccaatggtgccttgtgccacttccccttcctatacaacaaccacaattacactgattgcacttctgagggcagaagagacaacatgaagtggtgtgggaccacacagaactatgatgccgaccagaagtttgggttctgccccatggctgcccacgaggaaatctgcacaaccaatgaaggggtcatgtaccgcattggagatcagtgggataagcagcatgacatgggtcacatgatgaggtgcacgtgtgttgggaatggtcgtggggaatggacatgcattgcctactcgcaacttcgagatcagtgcattgttgatgacatcacttacaatgtgaacgacacattccacaagcgtcatgaagaggggcacatgctgaactgtacatgcttcggtcagggtcggggcaggtggaagtgtgatcccgtcgaccaatgccaggattcagagactgggacgttttatcaaattggagattcatgggagaagtatgtgcatggtgtcagataccagtgctactgctatggccgtggcattggggagtggcattgccaacctttacagacctatccaagctcaagtggtcctgtcgaagtatttatcactgagactccgagtcagcccaactcccaccccatccagtggaatgcaccacagccatctcacatttccaagtacattctcaggtggagacctaaaaattctgtaggccgttggaaggaagctaccataccaggccacttaaactcctacaccatcaaaggcctgaagcctggtgtggtatacgagggccagctcatcagcatccagcagtacggccaccaagaagtgactcgctttgacttcaccaccaccagcaccagcacacctgtgaccagcaacaccgtgacaggagagacgactcccttttctcctcttgtggccacttctgaatctgtgaccgaaatcacagccagtagctttgtggtctcctgggtctcagcttccgacaccgtgtcgggattccgggtggaatatgagctgagtgaggagggagatgagccacagtacctggatcttccaagcacagccacttctgtgaacatccctgacctgcttcctggccgaaaatacattgtaaatgtctatcagatatctgaggatggggagcagagtttgatcctgtctacttcacaaacaacagcgcctgatgcccctcctgacccgactgtggaccaagttgatgacacctcaattgttgttcgctggagcagaccccaggctcccatcacagggtacagaatagtctattcgccatcagtagaaggtagcagcacagaactcaaccttcctgaaactgcaaactccgtcaccctcagtgacttgcaacctggtgttcagtataacatcactatctatgctgtggaagaaaatcaagaaagtacacctgttgtcattcaacaagaaaccactggcaccccacgctcagatacagtgccctctcccagggacctgcagtttgtggaagtgacagacgtgaaggtcaccatcatgtggacaccgcctgagagtgcagtgaccggctaccgtgtggatgtgatccccgtcaacctgcctggcgagcacgggcagaggctgcccatcagcaggaacacctttgcagaagtcaccgggctgtcccctggggtcacctattacttcaaagtctttgcagtgagccatgggagggagagcaagcctctgactgctcaacagacaaccaaactggatgctcccactaacctccagtttgtcaatgaaactgattctactgtcctggtgagatggactccacctcgggcccagataacaggataccgactgaccgtgggccttacccgaagaggccagcccaggcagtacaatgtgggtccctctgtctccaagtaccccctgaggaatctgcagcctgcatctgagtacaccgtatccctcgtggccataaagggcaaccaagagagccccaaagccactggagtctttaccacactgcagcctgggagctctattccaccttacaacaccgaggtgactgagaccaccatcgtgatcacatggacgcctgctccaagaattggttttaagctgggtgtacgaccaagccagggaggagaggcaccacgagaagtgacttcagactcaggaagcatcgttgtgtccggcttgactccaggagtagaatacgtctacaccatccaagtcctgagagatggacaggaaagagatgcgccaattgtaaacaaagtggtgacaccattgtctccaccaacaaacttgcatctggaggcaaaccctgacactggagtgctcacagtctcctgggagaggagcaccaccccagacattactggttatagaattaccacaacccctacaaacggccagcagggaaattctttggaagaagtggtccatgctgatcagagctcctgcacttttgataacctgagtcccggcctggagtacaatgtcagtgtttacactgtcaaggatgacaaggaaagtgtccctatctctgataccatcatcccagctgttcctcctcccactgacctgcgattcaccaacattggtccagacaccatgcgtgtcacctgggctccacccccatccattgatttaaccaacttcctggtgcgttactcacctgtgaaaaatgaggaagatgttgcagagttgtcaatttctccttcagacaatgcagtggtcttaacaaatctcctgcctggtacagaatatgtagtgagtgtctccagtgtctacgaacaacatgagagcacacctcttagaggaagacagaaaacaggtcttgattccccaactggcattgacttttctgatattactgccaactcttttactgtgcactggattgctcctcgagccaccatcactggctacaggatccgccatcatcccgagcacttcagtgggagacctcgagaagatcgggtgccccactctcggaattccatcaccctcaccaacctcactccaggcacagagtatgtggtcagcatcgttgctcttaatggcagagaggaaagtcccttattgattggccaacaatcaacagtttctgatgttccgagggacctggaagttgttgctgcgacccccaccagcctactgatcagctgggatgctcctgctgtcacagtgagatattacaggatcacttacggagaaacaggaggaaatagccctgtccaggagttcactgtgcctgggagcaagtctacagctaccatcagcggccttaaacctggagttgattataccatcactgtgtatgctgtcactggccgtggagacagccccgcaagcagcaagccaatttccattaattaccgaacagaaattgacaaaccatcccagatgcaagtgaccgatgttcaggacaacagcattagtgtcaagtggctgccttcaagttcccctgttactggttacagagtaaccaccactcccaaaaatggaccaggaccaacaaaaactaaaactgcaggtccagatcaaacagaaatgactattgaaggcttgcagcccacagtggagtatgtggttagtgtctatgctcagaatccaagcggagagagtcagcctctggttcagactgcagtaaccaacattgatcgccctaaaggactggcattcactgatgtggatgtcgattccatcaaaattgcttgggaaagcccacaggggcaagtttccaggtacagggtgacctactcgagccctgaggatggaatccatgagctattccctgcacctgatggtgaagaagacactgcagagctgcaaggcctcagaccgggttctgagtacacagtcagtgtggttgccttgcacgatgatatggagagccagcccctgattggaacccagtccacagctattcctgcaccaactgacctgaagttcactcaggtcacacccacaagcctgagcgcccagtggacaccacccaatgttcagctcactggatatcgagtgcgggtgacccccaaggagaagaccggaccaatgaaagaaatcaaccttgctcctgacagctcatccgtggttgtatcaggacttatggtggccaccaaatatgaagtgagtgtctatgctcttaaggacactttgacaagcagaccagctcagggtgttgtcaccactctggagaatgtcagcccaccaagaagggctcgtgtgacagatgctactgagaccaccatcaccattagctggagaaccaagactgagacgatcactggcttccaagttgatgccgttccagccaatggccagactccaatccagagaaccatcaagccagatgtcagaagctacaccatcacaggtttacaaccaggcactgactacaagatctacctgtacaccttgaatgacaatgctcggagctcccctgtggtcatcgacgcctccactgccattgatgcaccatccaacctgcgtttcctggccaccacacccaattccttgctggtatcatggcagccgccacgtgccaggattaccggctacatcatcaagtatgagaagcctgggtctcctcccagagaagtggtccctcggccccgccctggtgtcacagaggctactattactggcctggaaccgggaaccgaatatacaatttatgtcattgccctgaagaataatcagaagagcgagcccctgattggaaggaaaaagacagacgagcttccccaactggtaacccttccacaccccaatcttcatggaccagagatcttggatgttccttccacagttcaaaagacccctttcgtcacccaccctgggtatgacactggaaatggtattcagcttcctggcacttctggtcagcaacccagtgttgggcaacaaatgatctttgaggaacatggttttaggcggaccacaccgcccacaacggccacccccataaggcataggccaagaccatacccgccgaatgtaggacaagaagctctctctcagacaaccatctcatgggccccattccaggacacttctgagtacatcatttcatgtcatcctgttggcactgatgaagaacccttacagttcagggttcctggaacttctaccagtgccactctgacaggcctcaccagaggtgccacctacaacatcatagtggaggcactgaaagaccagcagaggcataaggttcgggaagaggttgttaccgtgggcaactctgtcaacgaaggcttgaaccaacctacggatgactcgtgctttgacccctacacagtttcccattatgccgttggagatgagtgggaacgaatgtctgaatcaggctttaaactgttgtgccagtgcttaggctttggaagtggtcatttcagatgtgattcatctagatggtgccatgacaatggtgtgaactacaagattggagagaagtgggaccgtcagggagaaaatggccagatgatgagctgcacatgtcttgggaacggaaaaggagaattcaagtgtgaccctcatgaggcaacgtgttacgatgatgggaagacataccacgtaggagaacagtggcagaaggaatatctcggtgccatttgctcctgcacatgctttggaggccagcggggctggcgctgtgacaactgccgcagacctgggggtgaacccagtcccgaaggcactactggccagtcctacaaccagtattctcagagataccatcagagaacaaacactaatgttaattgcccaattgagtgcttcatgcctttagatgtacaggctgacagagaagattcccgagagtaaatcatctttccaatccagaggaacaagcatgtctctctgccaagatccatctaaactggagtgatgttagcagacccagcttagagttcttctttctttcttaagccctttgctctggaggaagttctccagcttcagctcaactcacagcttctccaagcatcaccctgggagtttcctgagggttttctcataaatgagggctgcacattgcctgttctgcttcgaagtattcaataccgctcagtattttaaatgaagtgattctaagatttggtttgggatcaataggaaagcatatgcagccaaccaagatgcaaatgttttgaaatgatatgaccaaaattttaagtaggaaagtcacccaaacacttctgctttcacttaagtgtctggcccgcaatactgtaggaacaagcatgatcttgttactgtgatattttaaatatccacagtactcactttttccaaatgatcctagtaattgcctagaaatatctttctcttacctgttatttatcaatttttcccagtatttttatacggaaaaaattgtattgaaaacacttagtatgcagttgataagaggaatttggtataattatggtgggtgattattttttatactgtatgtgccaaagctttactactgtggaaagacaactgttttaataaaagatttacattccaca

SEQ ID NO: 575 - DNA, 2286 bp, Homo sapiens
cctgtgagcaccacgtcaacggctcccggcccccatgcacgggggagggagatacccccaagtgtagcaagatctgtgagcctggctacagcccgacctacaaacaggacaagcactacggatacaattcctacagcgtctccaatagcgagaaggacatcatggccgagatctacaaaaacggccccgtggagggagctttctctgtgtattcggacttcctgctctacaagtcaggagtgtaccaacacgtcaccggagagatgatgggtggccatgccatccgcatcctgggctggggagtggagaatggcacaccctactggctggttgccaactcctggaacactgactggggtgacaatggcttctttaaaatactcagaggacaggatcactgtggaatcgaatcagaagtggtggctggaattccacgcaccgatcagtactgggaaaagatctaatctgccgtgggcctgtcgtgccagtcctgggggcgagatcggggtagaaatgcattttattctttaagttcacgtaagatacaagtttcagacagggtctgaaggactggattggccaaacatcagacctgtcttccaaggagaccaagtcctggctacatcccagcctgtggttacagtgcagacaggccatgtgagccaccgctgccagcacagagcgtccttccccctgtagactagtgccgtaggagtacctgctgccccagctgactgtggccccctccgtgatccatccatctccagggagcaagacagagacgcaggaatggaaagcggagttcctaacaggatgaaagttcccccatcagttcccccagtacctccaagcaagtagctttccacatttgtcacagaaatcagaggagagacggtgttggagccctttggagaacgccagtctcccaggccccctgcatctatcgagtttgcaatgtcacaacctctctgatcttgtgctcagcatgattctttaatagaagttttattttttcgtgcactctgctaatcatgtgggtgagccagtggaacagcgggagacctgtgctagttttacagattgcctccttatgacgcggctcaaaaggaaaccaagtggtcaggagttgtttctgacccactgatctctactaccacaaggaaaatagtttaggagaaaccagcttttactgtttttgaaaaattacagcttcaccctgtcaagttaacaaggaatgcctgtgccaataaaaggtttcggaattccgtcccctttcaagttttagggaaatttaactgaagtgtatacaaattagacattgctaatatgtacaaaagtattttatacggtttttgaacgatctagctatttgcaataaacaggatgttacaaaaacagtccaataatgcatttcctattaagaagcacaatacacaacataattcaattttattaaaaaataacttcaaaatgtagaacaatcccctttaggaagaaaagctatttctgtagttcactctgtcagtaaacacacaagttgaacgctgcagcagagggctgtccttttccatggagaaaagaaatgaggcttctagggcctatcttttctgggtaaaaattccacctacagctgagatgggcagttattgcctgtggtaggcagaatttgaaaatgccccttccccctttcaatgagctaatctccagaacccgtgaatatgatgagatgagacagtactcctgcaattatgttctatcgcacaatcaaccttaaaatatatctgtgggcttgagctaatcatatgcccctaaaacaggaggacgggagagagatatgaagcatgagaaagagcaggaaggctggtttgaagctggaggggaccacataagaaggaatgcaggcagccttgaggtgagagaggggcctccagctgagagccagcaaagaactgaattccgccaacaacctgaatgaacttagaagcagattcttccccagagcctccatgaaggaatgttgtcctgccaacccttatttcagcctttaagaccctgagcagagaatccagccacactgtgccagactcatgagctacagaactgctatgggtattgttttttaaactgctaaatttggggtaatttgtcacacagcaatagaaaactaatacactgcccaagggtaacttttcttaacctaattacatttggcagtttctgcttgggttctgaatgcatttttttacacaaagctctgctggaaaaactgaataacgcgctggcagc

SEQ ID NO: 576 - DNA, 1799 bp, Homo sapiens
cctctctgtgctgggttcctccagtgtagaggagaggcaggtacagcctgtcctcctggggacatggcatgagggccgcgtcctcacagcgcattctgtgttccagcatccccgaccagccccaaggtcttcccgctgagcctcgacagcaccccccaagatgggaacgtggtcgtcgcatgcctggtccagggcttcttcccccaggagccactcagtgtgacctggagcgaaagcggacagaacgtgaccgccagaaacttcccacctagccaggatgcctccggggacctgtacaccacgagcagccagctgaccctgccggccacacagtgcccagacggcaagtccgtgacatgccacgtgaagcactacacgaattccagccaggatgtgactgtgccctgccgaggtcagagggcaggctggggagtggggcggggccaccccgtcctgccctgacactgcgcctgcacccgtgttccccacagggagccgccccttcactcacaccagagtggaccgcgggccgagccccaggaggtggtggtggacaggccaggaggggcgaggcgggggcacggggaagggcgttctgaccagctcaggccatctctccactccagttcccccacctcccccatgctgccacccccgactgtcgctgcaccgaccggccctcgaggacctgctcttaggttcagaagcgaacctcacgtgcacactgaccggcctgagagatgcctctggtgccaccttcacctggacgccctcaagtgggaagagcgctgttcaaggaccacctgagcgtgacctctgtggctgctacagcgtgtccagtgtcctgcctggctgtgcccagccatggaaccatggggagaccttcacctgcactgctgcccaccccgagttgaagaccccactaaccgccaacatcacaaaatccggtgggtccagaccctgctcggggccctgctcagtgctctggtttgcaaagcatattcccggcctgcctcctccctcccaatcctgggctccagtgctcatgccaagtacagagggaaactgaggcaggctgaggggccaggacacagcccagggtgcccaccagagcagaggggctctctcatcccctgcccagccccctgacctggctctctaccctccaggaaacacattccggcccgaggtccacctgctgccgccgccgtcggaggagctggccctgaacgagctggtgacgctgacgtgcctggcacgtggcttcagccccaaggatgtgctggttcgctggctgcaggggtcacaggagctgccccgcgagaagtacctgacttgggcatcccggcaggagcccagccagggcaccaccaccttcgctgtgaccagcatactgcgcgtggcagccgaggactggaagaagggggacaccttctcctgcatggtgggccacgaggccctgccgctggccttcacacagaagaccatcgaccgcttggcgggtaaacccacccatgtcaatgtgtctgttgtcatggcggaggtggacggcacctgctactgagccgcccgcctgtccccacccctgaataaactccatgctcccccaagcagccccacgcttccatccggcgcctgtctgtccatcctcagggtctcagcacttgggaaagggccagggcatggacagggaagaataccccctgccctgagcctcggggggcccctggcacccccatgagactttccaccctggtgtgagtgtgagttgtgagtgtgagagtgtgtggtgcaggagg

SEQ ID NO: 577 - DNA, 2259 bp, Homo sapiens
gttctccccttcccggctttcggtccggaggaggcgggagcagcttccctgttctgatcctatcgcgggcggcgcagggccggcttggccttccgtgggacggggaggggggcgggatgtgtcacccaaataccagtggggacggtcggtggtggaaccagccgggcaggtcgggtagagtataagagccggagggagcggccgggcggcagacgcctgcagaccatcccagacgccggagcccgagccccgccgagtccccgcgcctcatccgcccgcgtccggtccgcgttcctccgccccaccatggctcggggccccggcctcgcgccgccaccgctgcggctgccgctgctgctgctggtgctggcggcggtgaccggccacacggccgcgcaggacaactgcacgtgtcccaccaacaagatgaccgtgtgcagccccgacggccccggcggccgctgccagtgccgcgcgctgggctcgggcatggcggtcgactgctccacgctgacctccaagtgtctgctgctcaaggcgcgcatgagcgcccccaagaacgcccgcacgctggtgcggccgagtgagcacgcgctcgtggacaacgatggcctctacgaccccgactgcgaccccgagggccgcttcaaggcgcgccagtgcaaccagacgtcggtgtgctggtgcgtgaactcggtgggcgtgcgccgcacggacaagggcgacctgagcctacgctgcgatgacctggtgcgcacccaccacatcctcattgacctgcgccaccgccccaccgccggcgccttcaaccactcagacctggacgccgagctgaggcggctcttccgcgagcgctatcggctgcaccccaagttcgtggcggccgtgcactacgagcagcccaccatccagatcgagctgcggcagaacacgtctcagaaggccgccggtgaagtggatatcggcgatgccgcctactacttcgagagggacatcaagggcgagtctctattccagggccgcggcggcctggacttgcgcgtgcgcggagaacccctgcaggtggagcgcacgctcatctattacctggacgagattcccccgaagttctccatgaagcgcctcaccgccggcctcatcgccgtcatcgtggtggtcgtggtggccctcgtcgccggcatggccgtcctggtgatcaccaaccggagaaagtcggggaagtacaagaaggtggagatcaaggaactgggggagttgagaaaggaaccgagcttgtaggtacccggcggggcaggggatggggtggggtaccggatttcggtatcgtcccagacccaagtgagtcacgcttcctgattcctcggcgcaaaggagacgtttatcctttcaaattcctgccttccccctcccttttgcgcacacaccaggtttaatagatcctggcctcagggtctcctttctttctcacttctgtcttgaaggaagcatttctaaaatgtatcccctttcggtccaacaacaggaaacctgactggggcagtgaaggaagggatggcacagcgttatgtgtaaaaaacaagtatctgtatgacaacccgggatcgtttgcaagtaactgaatccattgcgacattgtgaaggcttaaatgagtttagatgggaaatagcgttgttatcgccttgggtttaaattatttgatgagttccacttgtatcatggcctacccgaggagaagaggagtttgttaactgggcctatgtagtagcctcatttaccatcgtttgtattactgaccacatatgcttgtcactgggaaagaagcctgtttcagctgcctgaacgcagtttggatgtctttgaggacagacattgcccggaaactcagtctatttattcttcagcttgcccttactaccactgatattggtaatgttcttttttgtaaaatgtttgtacatatgttgtctttgataatgttgctgtaattttttaaaataaaacacgaatttaataaaatatgggaaaggcacaaaccagaagttggcatttgtgaaaagtccctccagatttctatcactttggtctctaatttcccaagacttgtattttttttttatttcaaattataacacttttttttcccccagaagtgggtgtttcatgttgctactctggtgtgtcccaagatatcctaactggccagtgtaaatgctattctttctaaataagattatttggaaacttccttcaaactgcag

SEQ ID NO: 578 - DNA, 4139 bp, Homo sapiens; identical to SEQ ID NO: 105

SEQ ID NO: 579 - DNA, 1261 bp, Homo sapiens
  misc_feature (1)...(1261): n=a,t,g or c
tgggaagaggatgatcctaaacaaagctctgatgctgggggcccttgccctgaccaccgtgatgagcccctgtggaggtgaagacattgtggctgaccacgtcgcctcttatggtgtaaacttgtaccagtcttacggtccctctggccagtacacccatgaatttgatggagatgagcagttctacgtggacctggggaggaaggagactgtctggtgtttgcctgttctcagacaatttagatttgacccgcaatttgcactgacaaacatcgctgtcctaaaacataacttgaacagtctgattaaacgctccaactctaccgctgctaccaatgaggttcctgaggtcacagtgttttccaagtctcccgtgacactgggtcagcccaacatcctcatctgtcttgtggacaacatctttcctcctgtggtcaacatcacatggctgagcaatgggcactcagtcacagaaggtgtttctgagaccagcttcctctccaagagtgatcattccttcttcaagatcagttacctcaccctcctcccttctgctgaggagagttatgactgcaaggtggagcactggggcctggacaagcctcttctgaaacactgggagcctgagattccagcccctatgtcagagctcacagagactgtggtctgcgccctgggattgtctgtgggcctcgtgggcattgtggtgggcactgtcttcatcatccgaggcctgcgttcagttggtgcttccagacaccaagggcccttgtgaatcccatcctggaatggaaggtgcatcgccatctacaggagcagaagagtggacttgctacatgacctagcattattttctggccccatttatcatatcccttttctcctccaaatgtttctcctctcacctcttctgtgggacttaaattgctatatctgctcagagctcacaaatgcctttgaattatttccctgacttcctgatttttttcttcttaagtgttacctactaagagttgcctggagtaagccacccagctacctaattcctcagtaacctccatctataatctccatggaagcaacaaattccctttatgagatatatgtcaaatttttccatctttcatcnagggctgactgaaaccgtggctaagaattgggagactctcttgtttcaagccaatttaacatcatttaccagatcatttgtcatgtccagtaacacagaagcaaccaactacagtatagcctgataacatga

SEQ ID NO: 580 - DNA, 756 bp, Homo sapiens
ctggagacacagatcgaggctctcaaggaggagctgctcttcatgaagaagaaccacgaagaggaagtaaaaggcctacaagcccagattgccagctctgggttgaccgtggaggtagatgccccgaaatctcaggacctctccaagatcatggcagacatccgggcccaatatgacgagctggctcggaagaaccgagaggagctagacaagtactggtctcagcagattgaggagagcaccacagtggtcaccacacagtctgctgaggttggagctgctgagacgacgctcacagagctgagacgtacagtccagtccttggagatccgactggaccgcatgagaaatctgaaggccagcttggagaacagcctgagggaggtggaggcccgttacgccctacagatggagcagctcaacgggatcctgctgcaccttgagtcagagctggcacagacccgggcagagggacagcgccaggcccaggagtatgaggccctgctgaacatcaaggtcaagctggaggctgagatcgccacctaccgccgcctgctggaagatggcgaggactttaatcttggtgatgccttggacagcagcaactccatgcaaaccatccaaaagaccaccacccgccggatagtggatggcaaagtggtgtctgagaccaatgacaccaaagttctgaggcattaagccagcagaagacgggtacctttggggagcaggaggccaataaaaagttcagagttc

SEQ ID NO: 581 - DNA, 534 bp, Homo sapiens
caggactcgacgtcggacctgatcccggccccacctctgagcaaggtccctctgcagcagaacttccaggacaaccaattccaggggaagtggtatgtggtaggcctggcagggaatgcaattctcagagaagacaaagacccgcaaaagatgtatgccaccatctatgagctgaaagaagacaagagctacaatgtcacctccgtcctgtttaggaaaaagaagtgtgactactggatcaggacttttgttccaggttgccagcccggcgagttcacgctgggcaacattaagagttaccctggattaacgagttacctcgtccgagtggtgagcaccaactacaaccagcatgctatggtgttcttcaagaaagtttctcaaaacagggagtacttcaagatcacgctctacgggagaaccaaggagctgacttcggaactaaaggagaacttcatccgcttctccaaatctctgggcctccctgaaaaccacatcgtcttccccgtccccatcgatcaatgcatcgacggc

SEQ ID NO: 582 - DNA, 594 bp, Homo sapiens
gtcactcctgccttcaccatgaagtccagcggcctcttccccttcctggtgctgcttgccctgggaactctggcaccttgggctgtggaaggctctggaaagtccttcaaagctggagtctgtcctcctaagaaatctgcccagtgccttagatacaagaaacctgagtgccagagtgactggcagtgtccagggaagaagagatgttgtcctgacacttgtggcatcaaatgcctggatcctgttgacaccccaaacccaacaaggaggaagcctgggaagtgcccagtgacttatggccaatgtttgatgcttaacccccccaatttctgtgagatggatggccagtgcaagcgtgacttgaagtgttgcatgggcatgtgtgggaaatcctgcgtttcccctgtgaaagcttgattcctgccatatggaggaggctctggagtcctgctctgtgtggtccaggtcctttccaccctgagacttggctccaccactgatatcctcctttggggaaaggcttggcacacagcaggctttcaagaagtgccagttgatcaatgaataaataaacgagcctatttctctttgcac

SEQ ID NO: 583 - DNA, 527 bp, Homo sapiens
ttggggctgtgctgggttttcctcgttgctcttttaagaggtgtccagtgtcaggtgcagctggtggagtctgggggaggcgtggtccagcctgggaggtccctgagactctcctgtgcagtctctggactcacctttagtagctatggtatgcactgggtccgccaggctccaggcaaggggctgcagtgggtggcagctatatcatatgatggaagtaataaatactacgcagactccttgaagggccgattcaccatctccagagacaattccaagaacacgctgtatctgcaaatgaacagcctgagatctgaggacacggctgtgtattactgtgcgagaggggcggggattactgatttttggagtggttattacgtcaactggttcgacccctggggccagggaaccctggtcaccgtctcctcagcttccaccaagggcccatcggtcttccccctggcgccctgctccaggagcacctctgggggcacagcggccctgggctgcctggtcaaggacta
